(19) United States
(12) Patent Application Publication
(10) Pub. No.: US 2014/0380520 A1
(43) Pub. Date: Dec. 25, 2014

(54) MANIPULATING PLANT SENSITIVITY TO LIGHT

(71) Applicants: MENDEL BIOTECHNOLOGY, INC., Hayward, CA (US); MONSANTO TECHNOLOGY, LLC, St. Louis, MO (US)

(72) Inventors: Rajnish Khanna, Livermore, CA (US); Brent A. Kronmiller, Corvallis, OR (US); Oliver J. Ratcliffe, Oakland, CA (US); T. Lynne Reuber, San Mateo, CA (US); Marie E. Petracek, Glendale, MO (US); Robert J. Meister, St. Peters, MO (US); Sasha Preuss, Webster Groves, MO (US); Amanda McClerren, St. Charles, MO (US); Qungang Qi, Chesterfield, MO (US)

(73) Assignees: MONSANTO TECHNOLOGY, LLC, St. Louis, MO (US); MENDEL BIOTECHNOLOGY, INC., Hayward, CA (US)

(21) Appl. No.: 14/118,491

(22) PCT Filed: May 18, 2012
(86) PCT No.: PCT/US12/38719

§ 371 Date: Jun. 20, 2014

Related U.S. Application Data
(60) Provisional application No. 61/488,592, filed on May 20, 2011.

(51) Int. Cl. C12N 15/82

(52) U.S. Cl. CPC C12N 15/8261; C12N 15/8241; C12N 15/8273; C12N 15/8243; C12N 15/8246; C12N 15/8245; C12N 15/8223; C12N 15/8271; C12N 15/8225; C12N 15/8229
USPC 800/270; 800/278; 800/284; 800/298; 435/419; 800/287

(57) ABSTRACT

The present disclosure identifies new genes which have the potential to increase broad acre yield in crops. This disclosure is based upon our fundamental knowledge of light signal transduction and our understanding of the roles these genes play in regulating plant growth and development in response to light. Transgenic plants with gain- or loss-of-function of one of these genes, or in combination, are expected to show significant improvements in broad acre yield and stress tolerance.

### CROSS REFERENCE TO RELATED APPLICATION

[0001] This application claims priority to U.S. Provisional Application Ser. No. 61/488,592 (filed on May 20, 2011), which is incorporated by reference herein in its entirety.

### JOINT RESEARCH AGREEMENT

[0002] The claimed invention, in the field of functional genomics and characterization of plant genes for the improvement of plants, was made by or on behalf of Mendel Biotechnology, Inc. and Monsanto Company as a result of activities undertaken within the scope of a joint research agreement in effect on or before the date the claimed invention was made.

### RELEVANT FIELD

[0003] The present disclosure relates to plant genomics and plant improvement.

### BACKGROUND

[0004] A plant's traits, including its biochemical, developmental, or phenotypic characteristics that enhance yield or tolerance to various abiotic stresses, may be controlled through a number of cellular processes. One important way to manipulate that control is through transcriptional regulators—proteins that influence the expression of a particular gene or sets of genes. Transgenic plants that comprise cells having altered levels of at least one selected transcriptional regulator, for example, possess advantageous or desirable traits. Strategies for manipulating traits by altering a plant cell's transcriptional regulator content can therefore result in plants and crops with commercially valuable properties.

### SUMMARY

[0005] The present disclosure identifies B-box genes that modify plant sensitivity to light. Manipulating light signaling processes through altering the expression/activities of these genes in plants will lead to enhanced agronomic characteristics, for example, increased crop yield and improved stress tolerance. Altering the expression/activity of the B-box genes of the present disclosure may also provide plants with altered levels of ureides, altered levels of hexose sugars, altered sucrose phosphate synthase (SPS) activity, altered levels of starch, and delayed senescence.

[0006] The present disclosure pertains to polynucleotide and polypeptide sequences provided herein and in the Sequence Listing. The present disclosure further pertains to nucleic acid constructs containing and/or expressing or suppressing the polynucleotide sequences provided herein and in the Sequence Listing, individually or in combination, either driven by a ubiquitously expressed, a stress- or a chemical-inducible, a tissue specific, a development specific or a diurnally-regulated promoter.

[0007] The present disclosure also pertains to transgenic plants with increased or decreased activities of one or more of the proteins provided herein and in the Sequence Listing, or encoded by the nucleic acid constructs containing and/or expressing or suppressing the polynucleotide sequences provided herein and in the Sequence Listing. The transgenic plants may exhibit changes in light sensitivity, resulting in improved vigor, improved yield and growth, and improved ability to cope with abiotic stresses compared to the wild type or other control plants. This approach can be combined with other growth-promoting factors to expand the benefits.

[0008] The present disclosure also provides methods for the selection and production of transgenic plants transformed with the disclosed B-box sequences or closely-related orthologs or paralogs. The selection may be made by identification in a plant (that is, a mature plant, a seed, a plant part, a seedling, plant tissue, plant cell, etc.) of the presence of a transgene or heterologous sequence that was transformed into the transgenic plant, or by an altered trait in the transgenic plant such as improved yield or increased tolerance to an abiotic stress, such as low nitrogen conditions, cold, water deprivation or drought, etc.

[0009] The present disclosure is also directed to transgenic seed produced by any of the transgenic plants of the present disclosure, including transgenic plants ectopically expressing or suppressing SEQ ID NO: 2N, where N=1-117, or 218-275, or ectopically expressing a polypeptide that regulates transcription and the polypeptide comprises a conserved domain of any of SEQ ID NO: 235-427, and to methods for selecting and/or making the disclosed transgenic plants and transgenic seeds.

### BRIEF DESCRIPTION OF THE SEQUENCE LISTING AND DRAWINGS

[0010] The Sequence Listing provides exemplary polynucleotide and polypeptide sequences. The traits associated with the use of the sequences are included in the Examples.

### Incorporation of the Sequence Listing

[0011] The copy of the Sequence Listing, being submitted electronically with this patent application, provided under 37 CFR §1.821-1.825, is a read-only memory computer-readable file in ASCII text format. The Sequence Listing is named “MBI_{—}0120 PCT_ST25”. The electronic file of the Sequence Listing was created on May 16, 2012, and is (724,396 bytes in size (707 kilobytes in size as measured in MS-WINDOWS). The Sequence Listing is herein incorporated by reference in its entirety.

[0012] FIG. 1 shows light-responsiveness of Arabidopsis seedlings transformed with 35S::AtBBX28 (G1481):cMYC (AtBBX28 is provided as SEQ ID NO: 2). Several independently transformed lines were grown in red light and mean hypocotyl lengths of 20-30 seedlings of each line are plotted with the empty-vector control (pMEN 65) and seedlings overexpressing BBX32 (G1988 OE; SEQ ID NO: 430). The dotted line marks the hypocotyl length of the control (pMEN 65; SEQ ID NO: 428).

[0013] FIG. 2 shows AtBBX28 (G1481, SEQ ID NO: 2) suppressing transcriptional activity of AtBBX21 (G1482, SEQ ID NO: 56) in protoplast co-transfection assays. Protoplasts were co-transformed with prCHS::GUS reporter and either CAT (control) alone, or HA:AtBBX21 (G1482) with one CAT, HA: BBX32, or HA:AtBBX28 (G1481). Note that GUS is β-glucuronidase, CAT is chloramphenicol acetyltransferase, and HA is hemagglutinin protein-fusion tag (Niman et al., 1983). RGA=relative GUS activity.

[0014] In FIGS. 3 and 4, the light-responsiveness of Arabidopsis seedlings of independently transformed lines is plotted as measures of hypocotyl length for the various plant lines. The dotted line marks the hypocotyl length of the control. Vertical axes are measured hypocotyl length (HL; in millimeters). An asterisk above the bars in FIGS. 3 and 4 indicates a p-value <0.05, and a double asterisk a p-value <0.01.

[0015] FIG. 3. Arabidopsis plant lines transformed with AtBBX25 (G1894, SEQ ID NO: 154; FIG. 3A), AtBBX24 (G329, SEQ ID NO: 152; FIG. 3B), AtBBX30 (G1478, SEQ ID NO: 40; FIG. 3C) and AtBBX18 (G1881, SEQ ID NO: 202; FIG. 3D) were grown in red light and mean hypocotyl lengths (HL) of 20-30 seedlings of each line are plotted with the control.

[0016] FIG. 4. Arabidopsis plant lines transformed with AtBBX7 (G2440, SEQ ID NO: 104; FIG. 4A), AtBBX26 (G1486, SEQ ID NO: 52; FIG. 4B), AtBBX19 (G902, SEQ ID NO: 200; FIG. 4C) and AtBBX20 (G1888, SEQ ID NO: 54; FIG. 4D) were grown in red light and mean hypocotyl lengths of 20-30 seedlings of each line are plotted with the control.

[0017] For FIGS. 5A-5E, FIGS. 6A-6D, FIG. 7, FIGS. 8A-8F, FIGS. 9A-9G and FIGS. 10A-10I, the SEQ ID NOs of the sequences appear in parentheses to the right of the sequence identifiers. In these Figures, an asterisk below any column indicates amino acid identity within the column. A colon indicates that the column is comprised of conservatively-related amino acid residues. A period indicates semi-conservatively-related amino acid residues.

[0018] FIGS. 5A-5E present an alignment of AtBBX25 (G1894, AT2G31380.1; SEQ ID NO: 154), AtBBX24 (G329, AT1G06040.1; SEQ ID NO: 152) and closely related sequences.

[0019] FIGS. 6A-6D represent an alignment of AtBBX19 (G902, AT4G38960.1; SEQ ID NO: 200), AtBBX18 (G1881, AT2G21320.1; SEQ ID NO: 202) and closely related sequences.

[0020] FIG. 7 shows an alignment of AtBBX30 (G1478, AT4G15248.1; SEQ ID NO: 40) and closely related sequences.

[0021] FIGS. 8A-8F present an alignment of AtBBX28 (G1481, AT4G27310.1; SEQ ID NO: 2) and AtBBX29 (G900, AT5G54470.1; SEQ ID NO: 4) and closely related sequences.

[0022] FIGS. 9A-9G displays an alignment of AtBBX20 (G1888, AT4G39070.1; SEQ ID NO: 54) and AtBBX21 (G1482, AT1G75540.1; SEQ ID NO: 56) and closely related sequences.

[0023] FIGS. 10A-10I show an alignment of AtBBX7 (G2440, AT3G07650.1, SEQ ID NO: 104), AtBBX8 (G1479, AT5G48250.1; SEQ ID NO: 106) and closely related sequences.

[0024] FIG. 11 shows microarray data from field grown soybean plants. Microarrays performed on tissues sampled throughout the day from the field demonstrated that 219 genes showed 2-fold or greater changes in abundance in transgenic events transformed with At.BBX32 relative to the control and that the majority of these changes occurred around dawn.

[0025] FIGS. 12A-12E shows a phylogenetic tree of the Arabidopsis thaliana and Glycine max B-box family, which contains 61 B-box sequences from soybean and 32 from Arabidopsis. Phylogenetic analysis of the B-box sequences shows that the sequences are clustered into structural groups (St) and clades (C). H refers to Arabidopsis homolog, N refers to other names.

[0026] FIGS. 13A-13D shows a phylogenetic tree for 61 B-box sequences from soybean. Phylogenetic analysis of the B-box sequences shows that these sequences are clustered into structural groups (St) and clades (C). A Y (yes) under I indicates a putative interactor of AtBBX32 (I (At)) or GmBBX52 (I (Gm)) based on Y2H analyses; T represents tissue of expression where L, l=leaf; C, c=cotyledon; A, a=all tissues; S, s=seed; F, f=flowers; N, n=nodules; P, p=pod; R, r=root; NR=not represented in TxP, where bold upper-case letters represent high expression; upper-case letters represent moderate expression, and lower-case letters represent average expression. TP refers to time of peak expression. SP refers to whether or not a shift in peak expression was observed in transgenic soybean plants expressing BBX32 (Y for yes and N for no). CD refers to at least 1.5 fold (except where *˜1.2-1.4 fold) change in expression at dawn in transgenic soybean plants expressing BBX32, where I=induced; S=suppressed. The first and second circles represent the first and the second B-box domain respectively; the rectangle represents the CCT domain.

[0027] FIG. 14 represents the single B-box clade in Arabidopsis thaliana and Glycine max. The Arabidopsis thaliana genome contains seven single B-box domain genes while the paleopolyploid Glycine max genome contains thirteen single B-box genes. Phylogenetic analysis indicates that GmBBX52 and GmBBX53 are orthologs of the Arabidopsis thaliana AtBBX32 gene.

[0028] FIG. 15 shows AtBBX32 and GmBBX62 interaction in vivo in soybean cotyledon protoplasts. Luminex co-immunoprecipitation (co-IP) was performed using antibody against GFP (A). The reciprocal co-IP was conducted using antibody against Flag tag (B). Components within the co-precipitated protein complexes were probed with biotinylated anti-Flag (A) and anti-GFP (B) antibodies, and subsequently detected with a fluorescently labeled R-phycoerythrin. MFI stands for Median Fluorescence Intensity. ** Mean differs significantly from controls at p<0.05.

[0029] FIG. 16 demonstrates that AtBBX32 interacts directly with GmBBX62 via in vitro pull-down assay. Pull-down reactions were carried out using recombinant flag-GmBBX62 and soluble AtBBX32 extracts from wheat germ in vitro translation system. Protein bound to flag-GmBBX62 was washed, separated on SDS-PAGE and immunoblotted with anti-flag antibody (A) and anti-AtBBX32 antibody (B). Lane 1, flag-GmBBX62; la, AtBBX32 wheat germ extract; 2, anti-flag antibody bound beads only; 3, AtBBX32 only, no flag-GmBBX62; 4, flag-GmBBX62+AtBBX32.

[0030] FIG. 17 shows AtBBX32 and GmBBX39 interaction in soybean protoplasts. Luminex co-IP assays were performed on extracts from soybean cotyledon protoplasts co-expressing AtBBX32 fused to GFP and GmBBX39 fused to the Myc epitope. A: IP with anti-GFP, detection with anti-Myc. B: IP with anti-Myc, detection with anti-GFP. MFI stands for Median Fluorescence Intensity. * denotes p<0.001.

### DETAILED DESCRIPTION

[0031] The present disclosure relates to polynucleotides and polypeptides for modifying phenotypes of plants, particularly those associated with increased abiotic stress tolerance and increased yield with respect to a control plant (for example, a wild-type plant). Throughout this disclosure, various information sources are referred to and/or are specifically incorporated. The information sources include scientific journal articles, patent documents, textbooks, and World Wide Web browser-inactive page addresses. While the reference to these information sources clearly indicates that they can be used by one of skill in the art, each and every one of the information sources cited herein are specifically incorporated in their entirety, whether or not a specific mention of “incorporation by reference” is noted. The contents and teachings of each and every one of the information sources can be relied on, used to make and use the disclosed embodiments.

[0032] As used herein and in the appended claims, the singular forms “a”, “an”, and “the” include the plural reference unless the context clearly dictates otherwise. Thus, for example, a reference to “a plant cell” includes a plurality of such plant cells, and a reference to “a stress” is a reference to one or more stresses and equivalents thereof known to those skilled in the art, and so forth.

### DEFINITIONS

[0033] “Polynucleotide” is a nucleic acid molecule comprising a plurality of polymerized nucleotides, e.g., at least about 15 consecutive polymerized nucleotides. A polynucleotide may be a nucleic acid, oligonucleotide, nucleotide, or any fragment thereof. In many instances, a polynucleotide comprises a nucleotide sequence encoding a polypeptide (or protein) or a domain or fragment thereof. Additionally, the polynucleotide may comprise a promoter, an intron, an enhancer region, a polyadenylation site, a translation initiation site, 5′ or 3′ untranslated regions, a reporter gene, a selectable marker, or the like. The polynucleotide can be single-stranded or double-stranded DNA or RNA. The polynucleotide optionally comprises modified bases or a modified backbone. The polynucleotide can be, e.g., genomic DNA or RNA, a transcript (such as an mRNA), a cDNA, a PCR product, a cloned DNA, a synthetic DNA or RNA, or the like. The polynucleotide can be combined with carbohydrate, lipids, protein, or other materials to perform a particular activity such as transformation or form a useful composition such as a peptide nucleic acid (PNA). The polynucleotide can comprise a sequence in either sense or antisense orientations. “Oligonucleotide” is substantially equivalent to the terms amplimer, primer, oligomer, element, target, and probe and is preferably single-stranded.

[0034] A “recombinant polynucleotide” is a polynucleotide that is not in its native state, e.g., the polynucleotide comprises a nucleotide sequence not found in nature, or the polynucleotide is in a context other than that in which it is naturally found, e.g., separated from nucleotide sequences with which it typically is in proximity in nature, or adjacent (or contiguous with) nucleotide sequences with which it typically is not in proximity. For example, the sequence at issue can be cloned into a vector, or otherwise recombined with one or more additional nucleic acid.

[0035] An “isolated polynucleotide” is a polynucleotide, whether naturally occurring or recombinant, that is present outside the cell in which it is typically found in nature, whether purified or not. Optionally, an isolated polynucleotide is subject to one or more enrichment or purification procedures, e.g., cell lysis, extraction, centrifugation, precipitation, or the like.

[0036] “Gene” or “gene sequence” refers to the partial or complete coding sequence of a gene, its complement, and its 5′ or 3′ untranslated regions. A gene is also a functional unit of inheritance, and in physical terms is a particular segment or sequence of nucleotides along a molecule of DNA (or RNA, in the case of RNA viruses) involved in producing a polypeptide chain. The latter may be subjected to subsequent processing such as chemical modification or folding to obtain a functional protein or polypeptide. A gene may be isolated, partially isolated, or found with an organism's genome. By way of example, a transcriptional regulator gene encodes a transcriptional regulator polypeptide, which may be functional or require processing to function as an initiator of transcription.

[0037] Operationally, genes may be defined by the cis-trans test, a genetic test that determines whether two mutations occur in the same gene and that may be used to determine the limits of the genetically active unit (Rieger et al., 1976). A gene generally includes regions preceding (“leaders”; upstream) and following (“trailers”; downstream) the coding region. A gene may also include intervening, non-coding sequences, referred to as “introns”, located between individual coding segments, referred to as “exons”. Most genes have an associated promoter region, a regulatory sequence 5′ of the transcription initiation codon (there are some genes that do not have an identifiable promoter). The function of a gene may also be regulated by enhancers, operators, and other regulatory elements.

[0038] A “polypeptide” is an amino acid sequence comprising a plurality of consecutive polymerized amino acid residues e.g., at least about 15 consecutive polymerized amino acid residues. In many instances, a polypeptide comprises a polymerized amino acid residue sequence that is a transcriptional regulator or a domain or portion or fragment thereof. Additionally, the polypeptide may comprise: (i) a localization domain; (ii) an activation domain; (iii) a repression domain; (iv) an oligomerization domain; (v) a protein-protein interaction domain; (vi) a DNA-binding domain; or the like. The polypeptide optionally comprises modified amino acid residues, naturally occurring amino acid residues not encoded by a codon, or non-naturally occurring amino acid residues.

[0039] “Protein” refers to an amino acid sequence, oligopeptide, peptide, polypeptide or portions thereof whether naturally occurring or synthetic.

[0040] A “recombinant polypeptide” is a polypeptide produced by translation of a recombinant polynucleotide. A “synthetic polypeptide” is a polypeptide created by consecutive polymerization of isolated amino acid residues using methods well known in the art. An “isolated polypeptide,” whether a naturally occurring or a recombinant polypeptide, is more enriched in (or out of) a cell than the polypeptide in its natural state in a wild-type cell, e.g., more than about 5% enriched, more than about 10% enriched, or more than about 20%, or more than about 50%, or more, enriched, i.e., alternatively denoted: 105%, 110%, 120%, 150% or more, enriched relative to wild type standardized at 100%. Such an enrichment is not the result of a natural response of a wild-type plant. Alternatively, or additionally, the isolated polypeptide is separated from other cellular components with which it is typically associated, e.g., by any of the various protein purification methods herein.

[0041] “Homology” refers to sequence similarity between a reference sequence and at least a fragment of a newly sequenced clone insert or its encoded amino acid sequence.

[0042] “Identity” or “similarity” refers to sequence similarity between two polynucleotide sequences or between two polypeptide sequences, with identity being a more strict comparison. The phrases “percent identity” and “% identity” refer to the percentage of sequence similarity found in a comparison of two or more polynucleotide sequences or two or more polypeptide sequences. “Sequence similarity” refers to the percent similarity in base pair sequence (as determined by any suitable method) between two or more polynucleotide sequences. Two or more sequences can be anywhere from 0-100% similar, or any integer value between 0-100%. Identity or similarity can be determined by comparing a position in each sequence that may be aligned for purposes of comparison. When a position in the compared sequence is occupied by the same nucleotide base or amino acid, then the molecules are identical at that position. A degree of similarity or identity between polynucleotide sequences is a function of the number of identical, matching or corresponding nucleotides at positions shared by the polynucleotide sequences. A degree of identity of polypeptide sequences is a function of the number of identical amino acids at corresponding positions shared by the polypeptide sequences. A degree of homology or similarity of polypeptide sequences is a function of the number of amino acids at corresponding positions shared by the polypeptide sequences.

[0043] “Alignment” refers to a number of nucleotide bases or amino acid residue sequences aligned by lengthwise comparison so that components in common (i.e., nucleotide bases or amino acid residues at corresponding positions) may be visually and readily identified. The fraction or percentage of components in common is related to the homology or identity between the sequences. Alignments such as those of FIGS. 4A-4F may be used to identify conserved domains and relatedness within these domains. An alignment may suitably be determined by means of computer programs known in the art, such as MACVECTOR software, 1999 (Accelrys, Inc., San Diego, Calif.).

[0044] A “conserved domain” or “conserved region” as used herein refers to a region in heterologous polynucleotide or polypeptide sequences where there is a relatively high degree of sequence identity between the distinct sequences. A “B-box zinc finger” domain, such as is found in a polypeptide member of B-box zinc finger family, is an example of a conserved domain. With respect to polynucleotides encoding presently disclosed polypeptides, a conserved domain is preferably at least nine base pairs (bp) in length. A conserved domain with respect to presently disclosed polypeptides refers to a domain within a polypeptide family that exhibits a higher degree of sequence homology, such as at least about 56%, 57%. 58%, 59%, 60%, 61%, 62%, 63%, 64%, 65%, 66%, 67%, 68%, 69%, 70%, 71%, 72%, 73%, 74%, 75%, 76%, 77%, 78%, 79%, 80%, 81%, 82%, 83%, 84%, 85%, 86%, 87%, 88%, 89%, 90%, 91%, 92%, 93%, 94%, 95%, 96%, 97%, 98%, 99%, or about 100% sequence identity to a conserved domain of a disclosed polypeptide (e.g., SEQ ID NOs: 235-427). Sequences that possess or encode for conserved domains that meet these criteria of percentage identity, and that have comparable biological activity to the present polypeptide sequences, thus being members of the BBX32 clade polypeptides, are encompassed by the present disclosure. A fragment or domain can be referred to as outside a conserved domain, outside a consensus sequence, or outside a consensus DNA-binding site that is known to exist or that exists for a particular polypeptide class, family, or sub-family. In this case, the fragment or domain will not include the exact amino acids of a consensus sequence or consensus DNA-binding site of a transcriptional regulator class, family or sub-family, or the exact amino acids of a particular transcriptional regulator consensus sequence or consensus DNA-binding site. Furthermore, a particular fragment, region, or domain of a polypeptide, or a polynucleotide encoding a polypeptide, can be “outside a conserved domain” if all the amino acids of the fragment, region, or domain fall outside of a defined conserved domain(s) for a polypeptide or protein. Sequences having lesser degrees of identity but comparable biological activity are considered to be equivalents.

[0045] As one of ordinary skill in the art recognizes, conserved domains may be identified as regions or domains of identity to a specific consensus sequence (see, for example, Riechmann et al., 2000a, 2000b). Thus, by using alignment methods well known in the art, the conserved domains of the plant polypeptides, for example, for the B-box zinc finger proteins (Putterill et al., 1995), may be determined.

[0046] The conserved domains for many of the disclosed polypeptide sequences are listed in Table 1. Also, the polypeptides of Table 1 have conserved domains specifically indicated by amino acid coordinate start and stop sites. A comparison of the regions of these polypeptides allows one of skill in the art (see, for example, Reeves and Nissen, 1990, 1995) to identify domains or conserved domains for any of the polypeptides listed or referred to in this disclosure.

[0047] “Complementary” refers to the natural hydrogen bonding by base pairing between purines and pyrimidines. For example, the sequence A-C-G-T (5′->3′) forms hydrogen bonds with its complements A-C-G-T (5′->3′) or A-C-G-U (5′->3′). Two single-stranded molecules may be considered partially complementary, if only some of the nucleotides bond, or “completely complementary” if all of the nucleotides bond. The degree of complementarity between nucleic acid strands affects the efficiency and strength of hybridization and amplification reactions. “Fully complementary” refers to the case where bonding occurs between every base pair and its complement in a pair of sequences, and the two sequences have the same number of nucleotides.

[0048] The terms “highly stringent” or “highly stringent condition” refer to conditions that permit hybridization of DNA strands whose sequences are highly complementary, wherein these same conditions exclude hybridization of significantly mismatched DNAs. Polynucleotide sequences capable of hybridizing under stringent conditions with the disclosed, orthologous or paralogous polynucleotides may be, for example, variants of the disclosed polynucleotide sequences, including allelic or splice variants, or sequences that encode orthologs or paralogs of presently disclosed polypeptides. Nucleic acid hybridization methods are disclosed in detail by Kashima et al., 1985; Sambrook et al., 1989; and by Haymes et al., 1985; which references are incorporated herein by reference.

[0049] In general, stringency is determined by the temperature, ionic strength, and concentration of denaturing agents (e.g., formamide) used in a hybridization and washing procedure (for a more detailed description of establishing and determining stringency, see the section “Identifying Polynucleotides or Nucleic Acids by Hybridization”, below). The degree to which two nucleic acids hybridize under various conditions of stringency is correlated with the extent of their similarity. Thus, similar nucleic acid sequences from a variety of sources, such as within a plant's genome (as in the case of paralogs) or from another plant (as in the case of orthologs) that may perform similar functions can be isolated on the basis of their ability to hybridize with known related polynucleotide sequences. Numerous variations are possible in the conditions and means by which nucleic acid hybridization can be performed to isolate related polynucleotide sequences having similarity to sequences known in the art and are not limited to those explicitly disclosed herein. Such an approach may be used to isolate polynucleotide sequences having various degrees of similarity with disclosed polynucleotide sequences, such as, for example, encoded transcriptional regulators having 56% or greater identity with the conserved domain of disclosed sequences.

[0050] The terms “paralog” and “ortholog” are defined below in the section entitled “Orthologs and Paralogs”. In brief, orthologs and paralogs are evolutionarily related genes that have similar sequences and functions. Orthologs are structurally related genes in different species that are derived by a speciation event. Paralogs are structurally related genes within a single species that are derived by a duplication event.

[0051] The term “equivalog” describes members of a set of homologous proteins that are conserved with respect to function since their last common ancestor. Related proteins are grouped into equivalog families, and otherwise into protein families with other hierarchically defined homology types. This definition is provided at the Institute for Genomic Research (TIGR) World Wide Web (www) website, “tigr.org” under the heading “Terms associated with TIGRFAMs”.

[0052] In general, the term “variant” refers to molecules with some differences, generated synthetically or naturally, in their base or amino acid sequences as compared to a reference (native) polynucleotide or polypeptide, respectively. These differences include substitutions, insertions, deletions or any desired combinations of such changes in a native polynucleotide of amino acid sequence.

[0053] With regard to polynucleotide variants, differences between presently disclosed polynucleotides and polynucleotide variants are limited so that the nucleotide sequences of the former and the latter are closely similar overall and, in many regions, identical. Due to the degeneracy of the genetic code, differences between the former and latter nucleotide sequences may be silent (i.e., the amino acids encoded by the polynucleotide are the same, and the variant polynucleotide sequence encodes the same amino acid sequence as the presently disclosed polynucleotide. Variant nucleotide sequences may encode different amino acid sequences, in which case such nucleotide differences will result in amino acid substitutions, additions, deletions, insertions, truncations or fusions with respect to the similar disclosed polynucleotide sequences. These variations may result in polynucleotide variants encoding polypeptides that share at least one functional characteristic. The degeneracy of the genetic code also dictates that many different variant polynucleotides can encode identical and/or substantially similar polypeptides in addition to those sequences illustrated in the Sequence Listing.

[0054] Also within the scope of the disclosed compositions and methods is a variant of a nucleic acid listed in the Sequence Listing, that is, one having a sequence that differs from the one of the polynucleotide sequences in the Sequence Listing, or a complementary sequence, that encodes a functionally equivalent polypeptide (i.e., a polypeptide having some degree of equivalent or similar biological activity) but differs in sequence from the sequence in the Sequence Listing, due to degeneracy in the genetic code. Included within this definition are polymorphisms that may or may not be readily detectable using a particular oligonucleotide probe of the polynucleotide encoding polypeptide, and improper or unexpected hybridization to allelic variants, with a locus other than the normal chromosomal locus for the polynucleotide sequence encoding polypeptide.

[0055] “Allelic variant” or “polynucleotide allelic variant” refers to any of two or more alternative forms of a gene occupying the same chromosomal locus. Allelic variation arises naturally through mutation, and may result in phenotypic polymorphism within populations. Gene mutations may be “silent” or may encode polypeptides having altered amino acid sequence. “Allelic variant” and “polypeptide allelic variant” may also be used with respect to polypeptides, and in this case the terms refer to a polypeptide encoded by an allelic variant of a gene.

[0056] “Splice variant” or “polynucleotide splice variant” as used herein refers to alternative forms of RNA transcribed from a gene. Splice variation naturally occurs as a result of alternative sites being spliced within a single transcribed RNA molecule or between separately transcribed RNA molecules, and may result in several different forms of mRNA transcribed from the same gene. Thus, splice variants may encode polypeptides having different amino acid sequences, which may or may not have similar functions in the organism. “Splice variant” or “polypeptide splice variant” may also refer to a polypeptide encoded by a splice variant of a transcribed mRNA.

[0057] As used herein, “polynucleotide variants” may also refer to polynucleotide sequences that encode paralogs and orthologs of the presently disclosed polypeptide sequences. “Polypeptide variants” may refer to polypeptide sequences that are paralogs and orthologs of the presently disclosed polypeptide sequences.

[0058] Differences between presently disclosed polypeptides and polypeptide variants are limited so that the sequences of the former and the latter are closely similar overall and, in many regions, identical. Presently disclosed polypeptide sequences and similar polypeptide variants may differ in amino acid sequence by one or more substitutions, additions, deletions, fusions and truncations, which may be present in any combination. These differences may produce silent changes and result in functionally equivalent polypeptides. Thus, it will be readily appreciated by those of skill in the art, that any of a variety of polynucleotide sequences is capable of encoding the disclosed polypeptides and homolog polypeptides. A polypeptide sequence variant may have “conservative” changes, wherein a substituted amino acid has similar structural or chemical properties. Deliberate amino acid substitutions may thus be made on the basis of similarity in polarity, charge, solubility, hydrophobicity, hydrophilicity, and/or the amphipathic nature of the residues, as long as a significant amount of the functional or biological activity of the polypeptide is retained. For example, negatively charged amino acids may include aspartic acid and glutamic acid, positively charged amino acids may include lysine and arginine, and amino acids with uncharged polar head groups having similar hydrophilicity values may include leucine, isoleucine, and valine; glycine and alanine; asparagine and glutamine; serine and threonine; and phenylalanine and tyrosine. More rarely, a variant may have “non-conservative” changes, e.g., replacement of a glycine with a tryptophan. Similar minor variations may also include amino acid deletions or insertions, or both. Related polypeptides may comprise, for example, additions and/or deletions of one or more N-linked or O-linked glycosylation sites, or an addition and/or a deletion of one or more cysteine residues. Guidance in determining which and how many amino acid residues may be substituted, inserted or deleted without abolishing functional or biological activity may be found using computer programs well known in the art, for example, DNASTAR software (see U.S. Pat. No. 5,840,544).

[0059] “Fragment”, with respect to a polynucleotide, refers to a clone or any part of a polynucleotide molecule that retains a usable, functional characteristic. Useful fragments include oligonucleotides and polynucleotides that may be used in hybridization or amplification technologies or in the regulation of replication, transcription or translation. A “polynucleotide fragment” refers to any subsequence of a polynucleotide, typically, of at least about 9 consecutive nucleotides, preferably at least about 30 nucleotides, more preferably at least about 50 nucleotides, of any of the sequences provided herein. Exemplary polynucleotide fragments are the first sixty consecutive nucleotides of the polynucleotides listed in the Sequence Listing. Exemplary fragments also include fragments that comprise a region that encodes a conserved domain of a polypeptide. Exemplary fragments also include fragments that comprise a conserved domain of a polypeptide. Exemplary fragments include fragments that comprise a conserved domain of a polypeptide, for example, any of SEQ ID NOs 235-427.

[0060] Fragments may also include subsequences of polypeptides and protein molecules, or a subsequence of the polypeptide. Fragments may have uses in that they may have antigenic potential. In some cases, the fragment or domain is a subsequence of the polypeptide which performs at least one biological function of the intact polypeptide in substantially the same manner, or to a similar extent, as does the intact polypeptide. For example, a polypeptide fragment can comprise a recognizable structural motif or functional domain such as a DNA-binding site or domain that binds to a DNA promoter region, an activation domain, or a domain for protein-protein interactions, and may initiate transcription. Fragments can vary in size from as few as 3 amino acid residues to the full length of the intact polypeptide, but are preferably at least about 30 amino acid residues in length and more preferably at least about 60 amino acid residues in length.

[0061] The term “plant” includes whole plants, shoot vegetative organs/structures (for example, leaves, stems and tubers), roots, flowers and floral organs/structures (for example, bracts, sepals, petals, stamens, carpels, anthers and ovules), seed (including embryo, endosperm, and seed coat) and fruit (the mature ovary), plant tissue (for example, vascular tissue, ground tissue, and the like) and cells (for example, guard cells, egg cells, and the like), and progeny of same. The class of plants that can be used in the disclosed methods is generally as broad as the class of higher and lower plants amenable to transformation techniques, including angiosperms (monocotyledonous and dicotyledonous plants), gymnosperms, ferns, horsetails, psilophytes, lycophytes, bryophytes, and multicellular algae (see for example, FIG. 1, adapted from Daly et al., 2001, FIG. 2, adapted from Ku et al., 2000; and see also Tudge, 2000).

[0062] A “control plant” as used in the present disclosure refers to a plant cell, seed, plant component, plant tissue, plant organ or whole plant used to compare against transgenic or genetically modified plant for the purpose of identifying an enhanced phenotype in the transgenic or genetically modified plant. A control plant may in some cases be a transgenic plant line that comprises an empty vector or marker gene, but does not contain the recombinant polynucleotide of the present disclosure that is expressed in the transgenic or genetically modified plant being evaluated. A control plant may in other cases be a progeny of a hemizygous transgenic plant line that does not contain the recombinant DNA, known as a negative segregant or negative isoline. In general, a control plant is a plant of the same line or variety as the transgenic or genetically modified plant being tested. A suitable control plant would include a genetically unaltered or non-transgenic plant of the parental line used to generate a transgenic plant herein.

[0063] A “transgenic plant” refers to a plant that contains genetic material not found in a wild-type plant of the same species, variety or cultivar. The genetic material may include a transgene, an insertional mutagenesis event (such as by transposon or T-DNA insertional mutagenesis), an activation tagging sequence, a mutated sequence, a homologous recombination event or a sequence modified by chimeraplasty. Typically, the foreign genetic material has been introduced into the plant by human manipulation, but any method can be used as one of skill in the art recognizes.

[0064] A transgenic plant may contain an expression vector or cassette. The expression cassette typically comprises a polypeptide-encoding or polypeptide-suppressing sequence operably linked to (i.e., under regulatory control of) appropriate inducible, tissue-enhanced, tissue-specific, diurnally regulated or constitutive regulatory sequences that allow for the controlled expression of the polypeptide. The expression cassette can be introduced into a plant by transformation or by breeding after transformation of a parent plant. A plant refers to a whole plant as well as to a plant part, such as seed, fruit, leaf, or root, plant tissue, plant cells or any other plant material, e.g., a plant explant, as well as to progeny thereof, and to in vitro systems that mimic biochemical or cellular components or processes in a cell.

[0065] A constitutive promoter is active under most environmental conditions and in most plant parts.

[0066] Tissue-enhanced (also referred to as tissue-preferred), tissue-specific, cell type-specific, and inducible promoters constitute non-constitutive promoters. Promoters under developmental control include promoters that preferentially initiate transcription in certain tissues, such as xylem, leaves, roots, or seeds. Such promoters are examples of tissue-enhanced or tissue-preferred promoters (see U.S. Pat. No. 7,365,186). Tissue-enhanced promoters can be found upstream and operatively linked to DNA sequences normally transcribed in higher levels in certain plant tissues or specifically in certain plant tissues, respectively. “Cell-enhanced”, “tissue-enhanced”, or “tissue-specific” regulation thus refer to the control of gene or protein expression, for example, by a promoter, which drives expression that is not necessarily totally restricted to a single type of cell or tissue, but where expression is elevated in particular cells or tissues to a greater extent than in other cells or tissues within the organism, and in the case of tissue-specific regulation, in a manner that is primarily elevated in a specific tissue. Tissue-enhanced or preferred promoters have been described in, for example, U.S. Pat. No. 7,365,186, or U.S. Pat. No. 7,619,133.

[0067] A “condition-enhanced” promoter refers to a promoter that activates a gene in response to a particular environmental stimulus, for example, an abiotic stress, infection caused by a pathogen, light treatment, chemical stimulus, etc., and that drives expression in a unique pattern which may include expression in specific cell and/or tissue types within the organism (as opposed to a constitutive expression pattern in all cell types of an organism at all times).

[0068] A “diurnal promoter” is useful for regulating changes in the timing of gene expression to a specific time of day. Usually genes that are diurnally-regulated peak at the same time in the day/night cycle. Genes that are under the regulation of diurnal promoters exhibit altered expression profiles under the control of a circadian oscillator mostly during the switch time of light to dark but also with diurnal oscillations that persist within a period close to 24 hour day/night cycle. Diurnal regulation is subject to environmental inputs such as light and temperature and the coordination by the circadian clock.

[0069] “Wild type” or “wild-type”, as used herein, refers to a plant cell, seed, plant component, plant part, plant tissue, plant organ or whole plant that has not been genetically modified or treated in an experimental sense. Wild-type cells, seeds, components, parts, tissues, organs or whole plants may be used as controls to compare levels of expression and the extent and nature of trait modification with cells, tissue or plants of the same species in which a polypeptide's expression is altered, e.g., in that it has been knocked out, overexpressed, or ectopically expressed.

[0070] A “trait” refers to a physiological, morphological, biochemical, or physical characteristic of a plant or particular plant material or cell. In some instances, this characteristic is visible to the human eye, such as seed or plant size, or can be measured by biochemical techniques, such as detecting the protein, starch, or oil content of seed or leaves, or by observation of a metabolic or physiological process, e.g. by measuring tolerance to water deprivation or particular salt or sugar concentrations, or by the observation of the expression level of a gene or genes, e.g., by employing Northern analysis, RT-PCR, microarray gene expression assays, or reporter gene expression systems, or by agricultural observations such as hyperosmotic stress tolerance or yield. Any technique can be used to measure the amount of, comparative level of, or difference in any selected chemical compound or macromolecule in the transgenic plants, however.

[0071] “Trait modification”, “modified trait” or “altered trait” refers to a detectable difference in a characteristic in a plant ectopically expressing a polynucleotide or polypeptide of the present disclosure relative to a plant not doing so, such as a wild-type plant. In some cases, the trait modification can be evaluated quantitatively. For example, the trait modification can entail at least about a 2% increase or decrease, or an even greater difference, in an observed trait as compared with a control or wild-type plant. It is known that there can be natural variations in the modified trait. Therefore, the trait modification observed entails a change of the normal distribution and magnitude of the trait in the plants as compared to control or wild-type plants.

[0072] When two or more plants have “similar morphologies”, “substantially similar morphologies”, “a morphology that is substantially similar”, or are “morphologically similar”, the plants have comparable forms or appearances, including analogous features such as overall dimensions, height, width, mass, root mass, shape, glossiness, leaf color, stem diameter, leaf size, leaf dimension, leaf density, internode distance or length, branching, root branching, number and form of inflorescences, and other macroscopic characteristics, and the individual plants are not readily distinguishable based on morphological characteristics alone.

[0073] “Modulates” refers to a change in activity (biological, chemical, or immunological) or lifespan resulting from specific binding between a molecule and either a nucleic acid molecule or a protein.

[0074] The term “transcript profile” refers to the expression levels of a set of genes in a cell in a particular state, particularly by comparison with the expression levels of that same set of genes in a cell of the same type in a reference state. For example, the expression level of a set of genes in a cell in which a particular polypeptide is overexpressed or suppressed can be compared to the expression level of the same set of genes in a cell that has normal levels of that polypeptide. The transcript profile can be presented as a list of those genes whose expression level is significantly different between the two treatments, and the difference ratios. Differences and similarities between expression levels may also be evaluated and calculated using statistical and clustering methods.

[0075] With regard to gene knockouts as used herein, the term “knockout” or “suppression” refers to a plant, plant cell, or plant tissue having a disruption in at least one gene, where the disruption results in a reduced or abolished expression or activity of the polypeptide encoded by that gene compared to a control plant, cell, or tissue. A knockout or suppression can occur in different ways, including but not limited to: decreasing levels of a protein; suppressing a mutation that has resulted in decreased activity of a protein; suppressing the production of an inhibitory agent; elevating, reducing or eliminating the level of substrate that an enzyme requires for activity; producing a new protein; and activating a normally silent gene, to accumulate a product that does not normally increase under natural conditions. The suppressor can be another mutation on a different gene, a suppressor mutation on the same gene but located some distance from the first mutation, or a suppressor in the cytoplasm that has generated due to a change in non-chromosomal DNA. The knockout can be the result of, for example, genomic disruptions, including transposons, tilling, and homologous recombination, antisense constructs, sense constructs, RNA silencing constructs, or RNA interference. A T-DNA insertion within a gene is an example of a genotypic alteration that may abolish expression of that gene. To knockout or suppress a gene, a recombinant expression cassette can be made. For example, the recombinant cassette can comprise a promoter that is functional in a plant cell and that is operably-linked to a polynucleotide that when expressed in a plant cell is transcribed into a polynucleotide molecule that suppresses the level of an endogenous protein in the plant cell relative to a control. The polynucleotide molecule can be, for example, a dsRNA that is processed into siRNAs that targets a messenger RNA encoding the protein; a miRNA that targets a messenger RNA encoding the protein; a trans-acting small interfering RNA (ta-siRNA) that is processed into siRNAs and that targets a messenger RNA encoding the protein; and a cleavage blocker of a miRNA or a miRNA decoy of a miRNA, which both lead to decreased activity of a miRNA. Examples of such RNAi-mediated gene suppression approaches are disclosed in US Patent Application Publication 2009/61288019, which is incorporated herein by reference.

[0076] “Ectopic expression or altered expression” in reference to a polynucleotide indicates that the pattern of expression in, e.g., a transgenic plant or plant tissue, is different from the expression pattern in a wild-type plant or plant tissue or a reference plant or plant tissue of the same species. For example, a polynucleotide or polypeptide is expressed in a cell or tissue type other than a cell or tissue type in which the sequence is expressed in the wild-type plant, or by expression at a time other than at the time the sequence is expressed in the wild-type plant, or by a response to different inducible agents, such as hormones or environmental signals, or at different expression levels (either higher or lower) compared with those found in a wild-type plant. The term also refers to altered expression patterns that are produced by lowering the levels of expression to below the detection level or completely abolishing expression. The resulting expression pattern can be transient or stable, constitutive or inducible. In reference to a polypeptide, the term “ectopic expression or altered expression” further may relate to altered activity levels resulting from the interactions of the polypeptides with exogenous or endogenous modulators or from interactions with factors or as a result of the chemical modification of the polypeptides.

[0077] The term “overexpression” as used herein refers to a greater expression level of a gene in a plant, plant cell or plant tissue, compared to expression in a wild-type plant, cell or tissue, at any developmental or temporal stage for the gene. Overexpression can occur when, for example, the genes encoding one or more polypeptides are under the control of a strong promoter (e.g., the cauliflower mosaic virus 35S transcription initiation region). Overexpression may also be under the control of a heterologous promoter, or an inducible or tissue specific promoter. Thus, overexpression may occur throughout a plant, in specific tissues of the plant, or in the presence or absence of particular environmental signals, depending on the promoter used. Overexpression may take place in plant cells normally lacking expression of polypeptides functionally equivalent or identical to the present polypeptides. Overexpression may also occur in plant cells where endogenous expression of the present polypeptides or functionally equivalent molecules normally occurs, but such normal expression is at a lower level. Overexpression thus results in a greater than normal production, or “overproduction” of the polypeptide in the plant, cell or tissue.

[0078] The term “transcription regulating region” refers to a DNA regulatory sequence that regulates the expression of one or more genes in a plant with a transcriptional regulator having one or more specific binding domains that binds to a DNA regulatory sequence. Transcriptional regulators possess a conserved domain. The transcriptional regulators also comprise an amino acid subsequence that forms a transcription activation domain that regulates expression of one or more abiotic stress tolerance genes in a plant when the transcriptional regulator binds to the regulating region.

[0079] “Increased yield” or “improved yield” or “increased plant yield” refers to increased plant growth, increased crop growth, increased biomass, increased grain yield, and/or increased plant product production, and is dependent to some extent on temperature, plant size, organ size, planting density, light, water and nutrient availability, and how the plant copes with various stresses, such as through temperature acclimation and water or nutrient use efficiency.

[0080] “Planting density” refers to the number of plants that can be grown per acre. For crop species, planting or population density varies from crop to crop, from one growing region to another, and from year to year. Using corn as an example, the average prevailing density in 2000 was in the range of 20,000-25,000 plants per acre in Missouri, USA. A desirable higher population density (a measure of yield) would be at least 22,000 plants per acre, and a more desirable higher population density would be at least 28,000 plants per acre, more preferably at least 34,000 plants per acre, and even more preferably at least 40,000 plants per acre. The average prevailing densities per acre of a few other examples of crop plants in the USA in the year 2000 were: wheat 1,000,000-1,500,000; rice 650,000-900,000; soybean 150,000-200,000, canola 260,000-350,000, sunflower 17,000-23,000 and cotton 28,000-55,000 plants per acre (Cheikh et al., 2003, in U.S. Patent Application No. 20030101479). A desirable higher population density for each of these examples, as well as other valuable species of plants, would be at least 10% higher than the average prevailing density or yield.

### DESCRIPTION OF THE SPECIFIC EMBODIMENTS

### Transcriptional Regulators Modify Expression of Endogenous Genes

[0081] A transcriptional regulator may include, but is not limited to, any polypeptide that can activate or repress transcription of a single gene or a number of genes. As one of ordinary skill in the art recognizes, transcriptional regulators can be identified by the presence of a region or domain of structural similarity or identity to a specific consensus sequence or the presence of a specific consensus DNA-binding motif (see, for example, Riechmann et al., 2000a). The plant transcriptional regulators of the present disclosure belong to the B-box zinc finger family (Putterill et al., 1995) and are putative transcriptional regulators.

[0082] Generally, transcriptional regulators are involved in cell differentiation and proliferation and the regulation of growth. Accordingly, one skilled in the art would recognize that by expressing the present sequences in a plant, one may change the expression of autologous genes or induce the expression of introduced genes. By affecting the expression of similar autologous sequences in a plant that have the biological activity of the present sequences, or by introducing the present sequences into a plant, one may alter a plant's phenotype to one with improved traits related to osmotic stresses. The disclosed sequences may also be used to transform a plant and introduce desirable traits not found in the wild-type cultivar or strain. Plants may then be selected for those that produce the most desirable degree of over- or under-expression of target genes of interest and coincident trait improvement.

[0083] The sequences of the present disclosure and closely related orthologous or paralogous sequences may be from any species, particularly plant species, in a naturally occurring form or from any source whether natural, synthetic, semi-synthetic or recombinant. The disclosed sequences may also include fragments of the present amino acid sequences. Where “amino acid sequence” is recited to refer to an amino acid sequence of a naturally occurring protein molecule, “amino acid sequence” and like terms are not meant to limit the amino acid sequence to the complete native amino acid sequence associated with the recited protein molecule.

[0084] In addition to methods for modifying a plant phenotype by employing one or more of the disclosed polynucleotides and polypeptides, the disclosed polynucleotides and polypeptides have a variety of additional uses. These uses include their use in the recombinant production (i.e., expression) of proteins; as regulators of plant gene expression, as diagnostic probes for the presence of complementary or partially complementary nucleic acids (including for detection of natural coding nucleic acids); as substrates for further reactions, e.g., mutation reactions, PCR reactions, or the like; as substrates for cloning e.g., including digestion or ligation reactions; and for identifying exogenous or endogenous modulators of the transcriptional regulators. The polynucleotide can be, e.g., genomic DNA or RNA, a transcript (such as an mRNA), a cDNA, a PCR product, a cloned DNA, a synthetic DNA or RNA, or the like. The polynucleotide can comprise a sequence in either sense or antisense orientations.

[0085] Expression of genes that encode polypeptides that modify expression of endogenous genes, polynucleotides, and proteins are well known in the art. In addition, transgenic plants comprising isolated polynucleotides encoding transcriptional regulators may also modify expression of endogenous genes, polynucleotides, and proteins. Examples include Peng et al., 1997, and Peng et al., 1999). In addition, many others have demonstrated that an Arabidopsis transcriptional regulator expressed in an exogenous plant species elicits the same or very similar phenotypic response. See, for example, Fu et al., 2001; Nandi et al., 2000; Coupland, 1995; and Weigel and Nilsson, 1995).

[0086] In another example, Mandel et al., 1992b, and Suzuki et al., 2001, teach that a transcriptional regulator expressed in another plant species elicits the same or very similar phenotypic response of the endogenous sequence, as often predicted in earlier studies of Arabidopsis transcriptional regulators in Arabidopsis (see Mandel et al., 1992a; Suzuki et al., 2001). Other examples include Müller et al., 2001; Kim et al., 2001; Kyozuka and Shimamoto, 2002; Boss and Thomas, 2002; He et al., 2000; and Robson et al., 2001).

[0087] In yet another example, Gilmour et al., 1998, teach an Arabidopsis AP2 transcriptional regulator, CBF1, which, when overexpressed in transgenic plants, increased plant freezing tolerance. Jaglo et al., 2001) further identified sequences in Brassica napus which encode CBF-like genes and showed that transcripts for these genes accumulated rapidly in response to low temperature. Transcripts encoding CBF-like proteins were also found to accumulate rapidly in response to low temperature in wheat, as well as in tomato. An alignment of the CBF proteins from Arabidopsis, B. napus, wheat, rye, and tomato revealed the presence of conserved consecutive amino acid residues which bracket the AP2/EREBP DNA binding domains of the proteins and distinguish them from other members of the AP2/EREBP protein family (Jaglo et al., 2001).

[0088] Transcriptional regulators mediate cellular responses and control traits through altered expression of genes containing cis-acting nucleotide sequences that are targets of the introduced transcriptional regulator. It is well appreciated in the art that the effect of a transcriptional regulator on cellular responses or a cellular trait is determined by the particular genes whose expression is either directly or indirectly (e.g., by a cascade of transcriptional regulator binding events and transcriptional changes) altered by transcriptional regulator binding. In a global analysis of transcription comparing a standard condition with one in which a transcriptional regulator is overexpressed, the resulting transcript profile associated with transcriptional regulator overexpression is related to the trait or cellular process controlled by that transcriptional regulator. For example, the PAP2 gene and other genes in the MYB family have been shown to control anthocyanin biosynthesis through regulation of the expression of genes known to be involved in the anthocyanin biosynthetic pathway (Bruce et al., 2000; and Borevitz et al., 2000). Consequently, it is evident to one skilled in the art that similarity of transcript profile upon overexpression of different transcriptional regulators would indicate similarity of transcriptional regulator function.

### The Disclosed Polypeptides and Polynucleotides

[0089] The present disclosure includes putative transcriptional regulators, and isolated or recombinant polynucleotides encoding the polypeptides, or novel sequence variant polypeptides or polynucleotides encoding novel variants of polypeptides derived from the specific sequences provided in the Sequence Listing; the disclosed recombinant polynucleotides may be incorporated in expression vectors for the purpose of producing transformed plants. Also provided are methods for modifying yield from a plant by modifying the mass, size or number of plant organs or seed of a plant by controlling a number of cellular processes, and for increasing a plant's resistance to abiotic stresses. These methods are based on the ability to alter the expression of critical regulatory molecules that may be conserved between diverse plant species. Related conserved regulatory molecules may be originally discovered in a model system such as Arabidopsis and homologous, functional molecules then discovered in other plant species. The latter may then be used to confer increased yield or abiotic stress tolerance in diverse plant species.

[0090] Exemplary polynucleotides encoding the polypeptides provided in Table 1 and Table 2 were identified in the Arabidopsis thaliana GenBank database using publicly available sequence analysis programs and parameters, and an in-house proprietary database. Sequences initially identified were then further characterized to identify sequences comprising specified sequence strings corresponding to sequence motifs present in families of known polypeptides. Additional disclosed polynucleotides were identified by screening Arabidopsis thaliana and/or other plant cDNA libraries with probes corresponding to known polypeptides under low stringency hybridization conditions. Additional sequences, including full length coding sequences, were subsequently recovered by the rapid amplification of cDNA ends (RACE) procedure using a commercially available kit according to the manufacturer's instructions. Where necessary, multiple rounds of RACE are performed to isolate 5′ and 3′ ends. The full-length cDNA was then recovered by a routine end-to-end polymerase chain reaction (PCR) using primers specific to the isolated 5′ and 3′ ends. Exemplary sequences are provided in the Sequence Listing.

[0091] Many of the sequences in the Sequence Listing, derived from diverse plant species, have been ectopically expressed in overexpressor plants. The changes in the characteristic(s) or trait(s) of the plants were then observed and found to confer increased yield and/or increased abiotic stress tolerance. Therefore, the polynucleotides and polypeptides can be used to improve desirable characteristics of plants.

[0092] The disclosed polynucleotides were also ectopically expressed in overexpressor plant cells and the changes in the expression levels of a number of genes, polynucleotides, and/or proteins of the plant cells observed. Therefore, the polynucleotides and polypeptides can be used to change expression levels of genes, polynucleotides, and/or proteins of plants or plant cells.

### General Considerations Related to Improving Plant Yield

[0093] The instant disclosure provides a novel method involving new gene technologies to improve plant yield. It is expected that either individually or in a combination with other genes or promoters, these novel methods will provide significantly higher improvements compared to previous methods.

[0094] Plants have evolved to sense the direction, color, intensity and duration of the incumbent light signals. Plants use this information to redirect their growth and developmental processes to optimize light absorption by promoting elongation growth under low light. Several genes have been implicated in playing roles in light signaling mechanisms regulating plant growth and development. Here, light responsiveness of young seedlings overexpressing some of the individual B-box genes to determine their roles in light signaling was examined. There is precedent that suppressing light signaling leads to crop improvement (U.S. Pat. No. 7,692,067).

[0095] The instant disclosure identifies several Arabidopsis thaliana B-box genes which can function negatively in light signaling and it is expected that either independently or in combination with other genes (such as with AtBBX32, GmBBX52 or GmBBX53) or specific promoters, these polynucleotides and their encoded polypeptides will provide significantly improved yield benefits and resistance to abiotic stress. It is also expected that these polynucleotides and their encoded polypeptides will provide plants with altered levels of ureides, altered levels of hexose sugars, altered SPS activity, altered levels of starch, and delayed senescence (International Application No. PCT/US2012/029885). It is further expected that the functionally similar orthologs or paralogs of these polynucleotides and their encoded polypeptides, either expressed individually or in combination with other polynucleotides and their encoded polypeptides, will lead to plants with higher yield advantages, improved stress tolerance, altered levels of ureides, altered levels of hexose sugars, altered SPS activity, altered levels of starch, and delayed senescence.

[0096] The instant disclosure also identifies several Glycine max B-box genes. Some of the encoded polypeptides of these Glycine max genes may interact with AtBBX32, or may be overexpressed or suppressed, in transgenic soybean plants overexpressing AtBBX32. Some of the encoded polypeptides of these Glycine max genes may interact with GmBBX52 in transgenic soybean plants overexpressing GmBBX52. Since expression of AtBBX32 and its soybean homologs, GmBBX52 and GmBBX53, modulates a variety of traits including yield, it is expected that either independently or in combination with other genes (such as with AtBBX32, GmBBX52 or GmBBX53) or specific promoters, altering the levels of these polynucleotides and their encoded polypeptides will provide plants with significantly improved yield benefits, resistance to abiotic stress, altered levels of ureides, altered levels of hexose sugars, altered SPS activity, altered levels of starch, and delayed senescence. It is also expected that the functionally similar orthologs or paralogs of these polynucleotides and their encoded polypeptides, either expressed individually or in combination with other polynucleotides and their encoded polypeptides, will lead to plants with higher yield advantages, improved stress tolerance, altered levels of ureides, altered levels of hexose sugars, altered SPS activity, altered levels of starch, and delayed senescence.

### Background Information for BBX32, the BBX32 Clade, and Related Sequences

[0097] BBX32 is a B-box zinc finger protein with homology to the CONSTANS family of transcriptional regulators. BBX32 is expressed in many tissues and may be diurnally regulated.

[0098] As disclosed below in the Examples, constitutive expression of BBX32 in Arabidopsis modulates plant growth processes, including elongation of hypocotyls, extended petioles and upheld leaves, early flowering; enhanced root and/or shoot growth in phosphate-limited media; more secondary roots on control media, enhanced growth and reduced anthocyanin in low nitrogen/high sucrose media supplemented with glutamine, enhanced root growth on salt-containing media, and enhanced root growth on polyethylene glycol-containing media, as compared to control plants. BBX32 overexpression in soybean plants has been shown to result in a statistically significant increase in yield in field trials (see U.S. Pat. No. 7,692,067) as compared to controls that do not contain the BBX32 polynucleotide.

[0099] As noted in the Examples presented below, overexpression of BBX32 in Arabidopsis produced several phenotypes consistent with a role of this gene in light regulated development and possibly diurnal or circadian regulated processes. Light exerts a major influence in the initiation and maintenance (re-setting) of the plant circadian processes. Early seedling development is light dependent (de-etiolation) and is marked by inhibition of hypocotyl cell elongation along with cotyledon expansion and greening. Light controls morphological changes throughout the life of the plant, either directly or by regulating circadian gene expression. Some of these changes include petiole development, control of growth rate and flowering. It is likely that the ectopic expression of BBX32 product affects light signaling and/or circadian processes. Based upon the observations described above, it is clear that BBX32 is involved in photomorphogensis and regulating plant growth and development. Hence, its overexpression may improve plant vigor, thus explaining the yield enhancements seen in 35S::BBX32 soybean plants.

TABLE 1
Conserved domains and potentially valuable morphological traits of B-box sequences

| | | | | | | |
|---|---|---|---|---|---|---|
| | | | | | | Column 7 |
| | | Column 3 | Column 4 | | | Percent |
| Column 1 | | Percent | Amino | | | identity of |
| Poly- | | identity of | acid | | Column 6 | domain in |
| peptide | Column 2 | polypeptide | coor- | | SEQ ID | column 5 |
| SEQ ID | Species/GID | to clade | dinates | Column 5 | NO: of | (no. identical |
| NO: | No. | identifier | of domain | Domain sequence | domain | residues) |

AtBBX28 (G1481)clade (clade identifier G1481):

| | | | | | | |
|---|---|---|---|---|---|---|
| 2 | At/G1481 | 100.0% to | 5-41 | CDLCNGVARMYCESD | 235 | 100% |
| | | G1481 | | QASLCWDCDGKVHG | | (37/37) |
| | | | | ANFLVAKH | | |
| 4 | At/G900 | 48.4% to | 6-42 | CELCCGVARMYCESD | 236 | 95% |
| | | G1481 | | QASLCWDCDGKVHG | | (35/37) |
| | | | | ANFLVAKH | | |
| 6 | Zm/ACN33981.1 | 35.3% to | 28-64 | CELCGAAARVYCGAD | 237 | 65% |
| | | G1481 | | EATLCWGCDAQVHGA | | (24/37) |
| | | | | NFLVARH | | |
| 8 | Pt/Pt_568988 | 37.1% to | 89-125 | CELCGSSARMYCESD | 238 | 84% |
| | | G1481 | | QASLCWDCDEKVHTA | | (31/37) |
| | | | | NFLVAKH | | |
| 10 | Pt/Pt_571834 | 26.5% to | 4-40 | CELCKNPARTYCESDE | 239 | 73% |
| | | G1481 | | ANLCWNCDTKVHGA | | (27/37) |
| | | | | NFLVARH | | |
| 12 | Pt/Pt_582065 | 35.4% to | 4-40 | CELCGSSARMFCESDQ | 240 | 81% |
| | | G1481 | | ASLCWDCDEKVHSAN | | (30/37) |
| | | | | FLVAKH | | |
| 14 | Pt/Pt_758524 | 28.3% to | 4-40 | CELCDSFAQMHCESD | 241 | 65% |
| | | G1481 | | QAILCSACDAYVHSAN | | (24/37) |
| | | | | FLAAKH | | |
| 16 | Os/Os08g08120.1 | 34.8% to | 24-60 | CELCGAAARVYCGAD | 242 | 65% |
| | | G1481 | | EATLCWGCDAQVHGA | | (24/37) |
| | | | | NFLVARH | | |
| 18 | Os/Os08g08120.2 | 36.0% to | 24-60 | CELCGAAARVYCGAD | 243 | 65% |
| | | G1481 | | EATLCWGCDAQVHGA | | (24/37) |
| | | | | NFLVARH | | |
| 20 | Os/Os08g08120.3 | 36.3% to | 24-60 | CELCGAAARVYCGAD | 244 | 65% |
| | | G1481 | | EATLCWGCDAQVHGA | | (24/37) |
| | | | | NFLVARH | | |
| 22 | Gm/Glyma06g3 | 41.0% to | 8-44 | CVLCEKRAMMLCDSD | 245 | 70% |
| | 9810.1 | G1481 | | QAKLCWECDEKVHSA | | (26/37) |
| | | | | NFLVAKH | | |
| 24 | Gm/Glyma06g4 | 38.9% to | 4-40 | CELCKVPARIFCESDQ | 246 | 76% |
| | 5620.1 | G1481 | | ASLCWDCDAKVHSAN | | (28/37) |
| | | | | FLVARH | | |
| 26 | Gm/G4015 | 23.7% to | 6-42 | CELCHQLASLYCPSDS | 247 | 59% |
| | | G1481 | | AFLCFHCDAAVHAAN | | (22/37) |
| | | | | FLVARH | | |
| 28 | Gm/Glyma09g3 | 21.0% to | 6-42 | CALCKKRAMMLCDSD | 248 | 70% |
| | 5960.1 | G1481 | | QAKLCWECDEKVHSA | | (26/37) |
| | | | | NFLVAKH | | |
| 30 | Gm/Glyma12g1 | 37.1% to | 4-40 | CELCKVPARIFCESDQ | 249 | 76% |
| | 1230.1 | G1481 | | ASLCWDCDAKVHSAN | | (28/37) |
| | | | | FLVARH | | |
| 32 | Gm/Glyma12g3 | 41.5% to | 4-40 | CELCKLPARTFCESDQ | 250 | 78% |
| | 2470.1 | G1481 | | ASLCWDCDAKVHGA | | (29/37) |
| | | | | NFLVARH | | |
| 34 | Gm/G4014 | 38.1% to | 4-40 | CELCNSPAKLFCESDQ | 251 | 73% |
| | | G1481 | | ASLCWKCDAKVHSAN | | (27/37) |
| | | | | FLVTKH | | |
| 36 | Gm/G4016 | 39.6% to | 4-40 | CELCKLPARTFCESDQ | 252 | 76% |
| | | G1481 | | ASLCWDCDAKVHGA | | (28/37) |
| | | | | NFLVERH | | |
| 38 | Gm/Glyma15g0 | 37.2% to | 4-40 | CELCNSPAKLFCESDQ | 253 | 73% |
| | 7140.1 | G1481 | | ASLCWECDAKVHSAN | | (27/37) |
| | | | | FLVTKH | | |

AtBBX25 (G1894) clade (clade identifier G1894):

| | | | | | | |
|---|---|---|---|---|---|---|
| 152 | At/G329 | 69.2% to | 5-42^{a} | CDVCEKAPATVICCAD | 254 | 87% |
| | | G1894 | | EAALCPQCDIEIHAAN | | (33/38) |
| | | | | KLASKH | | |
| 152 | At/G329 | 69.2% to | 57-94^{b} | CDICQEKAAFIFCVED | 255 | 84% |
| | | G1894 | | RALLCRDCDESIHVAN | | (32/38) |
| | | | | SRSANH | | |
| 154 | At/G1894 | 100.0% to | 5-42^{a} | CDVCEKAPATLICCAD | 256 | 100% |
| | | G1894 | | EAALCAKCDVEVHAA | | (38/38) |
| | | | | NKLASKH | | |
| 154 | At/G1894 | 100.0% to | 57-94^{b} | CDICLEKAAFIFCVEDR | 257 | 100% |
| | | G1894 | | ALLCRDCDEATHAPN | | (38/38) |
| | | | | TRSANH | | |
| 156 | Zm/ACF84591.1 | 50.0% to | 5-42^{a} | CDACEGAAATVVCCA | 258 | 82% |
| | | G1894 | | DEAALCARCDVEIHA | | (31/38) |
| | | | | ANKLASKH | | |
| 156 | Zm/ACF84591.1 | 50.0% to | 57-94^{b} | CDVCQEKAAFIFCVED | 259 | 74% |
| | | G1894 | | RALFCQDCDEPIHVPG | | (28/38) |
| | | | | TLSGNH | | |
| 158 | Zm/ACF86823.1 | 50.4% to | 5-42^{a} | CDACEGAAATVVCCA | 260 | 82% |
| | | G1894 | | DEAALCARCDVEIHA | | (31/38) |
| | | | | ANKLASKH | | |
| 158 | Zm/ACF86823.1 | 50.4% to | 57-94^{b} | CDVCQEKAAFIFCVED | 261 | 76% |
| | | G1894 | | RALFCRDCDEPIHVPG | | (29/38) |
| | | | | TLSGNH | | |
| 162 | Zm/CAW36812.1 | 50.4% to | 5-42^{a} | CDACEGAAATVVCCA | 262 | 82% |
| | | G1894 | | DEAALCARCDVEIHA | | (31/38) |
| | | | | ANKLASKH | | |
| 162 | Zm/CAW36812.1 | 50.4% to | 57-94^{b} | CDVCQEKAAFIFCVED | 263 | 76% |
| | | G1894 | | RALFCRDCDEPIHVPG | | (29/38) |
| | | | | TLSGNH | | |
| 176 | Pt/Pt_216458 | 45.4% to | 5-42^{a} | CDVCEKAPATVICCAD | 264 | 92% |
| | | G1894 | | EAALCEKCDIEVHAAN | | (35/38) |
| | | | | KLASKH | | |
| 176 | Pt/Pt_216458 | 45.4% to | 57-94^{b} | CDICQEKAAFIFCVED | 265 | 76% |
| | | G1894 | | RALFCRDCDEPIHSAG | | (29/38) |
| | | | | SLSANH | | |
| 178 | Pt/Pt_827145 | 62.7% to | 5-42^{a} | CDVCEKAPATVICCAD | 266 | 95% |
| | | G1894 | | EAALCAKCDIEVHAA | | (36/38) |
| | | | | NKLASKH | | |
| 178 | Pt/Pt_827145 | 62.7% to | 57-94^{b} | CDICQEKAAFIFCVED | 267 | 76% |
| | | G1894 | | RALFCRDCDEPIHSAG | | (29/38) |
| | | | | SLSANH | | |
| 180 | Os/Os02g39360.1 | 49.6% to | 5-42^{a} | CDACESAAAAVVCCA | 268 | 79% |
| | | G1894 | | DEAALCAACDVEVHA | | (30/38) |
| | | | | ANKLAGKH | | |
| 180 | Os/Os02g39360.1 | 49.6% to | 57-94^{b} | CDVCQEKAAFIFCVED | 269 | 76% |
| | | G1894 | | RALFCRDCDEPIHVPG | | (29/38) |
| | | | | TLSGNH | | |
| 182 | Os/Os04g41560.2 | 48.1% to | 5-42^{a} | CDACEAAAATVVCCA | 270 | 82% |
| | | G1894 | | DEAALCARCDVEIHA | | (31/38) |
| | | | | ANKLASKH | | |
| 182 | Os/Os04g41560.2 | 48.1% to | 58-95^{b} | CDVCQEKAAFIFCVED | 271 | 76% |
| | | G1894 | | RALFCRDCDEPIHVPG | | (29/38) |
| | | | | TLSGNH | | |
| 184 | Os/Os04g41560.4 | 41.8% to | 5-42^{a} | CDACEAAAATVVCCA | 272 | 82% |
| | | G1894 | | DEAALCARCDVEIHA | | (31/38) |
| | | | | ANKLASKH | | |
| 184 | Os/Os04g41560.4 | 41.8% to | 58-95^{b} | CDVCQEKAAFIFCVED | 273 | 76% |
| | | G1894 | | RALFCRDCDEPIHVPG | | (29/38) |
| | | | | TLSGNH | | |
| 186 | Gm/Glyma11g1 | 58.9% to | 5-42^{a} | CDVCEKAPATVICCAD | 274 | 97% |
| | 3570 | G1894 | | EAALCAKCDVEVHAA | | (37/38) |
| | | | | NKLASKH | | |
| 186 | Gm/Glyma11g1 | 58.9% to | 57-94^{b} | CDICQDKPAFIFCVED | 275 | 68% |
| | 3570.1 | G1894 | | RALFCKDCDEPIHLAS | | (26/38) |
| | | | | SLSANH | | |
| 188 | Gm/Glyma12g0 | 58.7% to | 5-42^{a} | CDVCEKAPATVICCAD | 276 | 97% |
| | 5570.1 | G1894 | | EAALCAKCDVEVHAA | | (37/38) |
| | | | | NKLASKH | | |
| 188 | Gm/Glyma12g0 | 58.7% to | 57-94^{b} | CDICQDKPAFIFCVED | 277 | 68% |
| | 5570.1 | G1894 | | RALFCKDCDEPIHLAS | | (26/38) |
| | | | | SLSANH | | |
| 190 | Gm/Glyma13g4 | 58.1% to | 5-42^{a} | CDVCERAPATVICCAD | 278 | 95% |
| | 1980.1 | G1894 | | EAALCAKCDVEVHAA | | (36/38) |
| | | | | NKLASKH | | |
| 190 | Gm/Glyma13g4 | 58.1% to | 57-94^{b} | CDICQDKPAFIFCVED | 279 | 68% |
| | 1980.1 | G1894 | | RALFCQDCDEPIHSAG | | (26/38) |
| | | | | SLSANH | | |
| 192 | Gm/Glyma13g4 | 39.1% to | 24-57^{a} | QDKPAFIFCVEDRALF | 280 | 35% |
| | 1980.2 | G1894 | | CQDCDEPIHSAGSLSA | | (12/34) |
| | | | | NH | | |
| 192 | Gm/Glyma13g4 | 39.1% to | 25-57^{b} | DKPAFIFCVEDRALFC | 281 | 67% |
| | 1980.2 | G1894 | | QDCDEPIHSAGSLSAN | | (22/33) |
| | | | | H | | |
| 194 | Gm/Glyma13g4 | 39.1% to | 24-57^{a} | QDKPAFIFCVEDRALF | 282 | 35% |
| | 1980.3 | G1894 | | CQDCDEPIHSAGSLSA | | (12/34) |
| | | | | NH | | |
| 194 | Gm/Glyma13g4 | 39.1% to | 25-57^{b} | DKPAFIFCVEDRALFC | 283 | 67% |
| | 1980.3 | G1894 | | QDCDEPIHSAGSLSAN | | (22/33) |
| | | | | H | | |
| 196 | Gm/Glyma15g0 | 57.9% to | 5-42^{a} | CDVCERAPATVICCAD | 284 | 95% |
| | 3400.1 | G1894 | | EAALCAKCDVEVHAA | | (36/38) |
| | | | | NKLASKH | | |
| 196 | Gm/Glyma15g0 | 57.9% to | 57-94^{b} | CDICQDKPAFIFCVED | 285 | 68% |
| | 3400.1 | G1894 | | RALFCQDCDEPIHSAG | | (26/38) |
| | | | | SLSANH | | |
| 198 | S1/AAS67368 | 58.2% to | 5-42^{a} | CDVCEKAQATVICCA | 286 | 92% |
| | | G1894 | | DEAALCAKCDIEVHA | | (35/38) |
| | | | | ANKLASKH | | |
| 198 | S1/AAS67368 | 58.2% to | 57-94^{b} | CDICQDKAAFIFCVED | 287 | 68% |
| | | G1894 | | RALFCKDCDEAIHSAS | | (26/38) |
| | | | | SLAKNH | | |

AtBBX20 (G1888) clade (clade identifier G1888):

| | | | | | | |
|---|---|---|---|---|---|---|
| 54 | At/G1888 | 100.0% to | 5-42^{a} | CAVCDKEEASVFCCA | 288 | 100% |
| | | G1888 | | DEAALCNGCDRHVHF | | (38/38) |
| | | | | ANKLAGKH | | |
| 54 | At/G1888 | 100.0% to | 58-95^{b} | CDICGERRALLFCQED | 289 | 100% |
| | | G1888 | | RAILCRECDIPIHQANE | | (38/38) |
| | | | | HTKKH | | |
| 56 | At/G1482 | 37.4% to | 5-42^{a} | CDVCDKEEASVFCTA | 290 | 79% |
| | | G1888 | | DEASLCGGCDHQVHH | | (30/38) |
| | | | | ANKLASKH | | |
| 56 | At/G1482 | 37.4% to | 60-97^{b} | CDICQDKKALLFCQQD | 291 | 74% |
| | | G1888 | | RAILCKDCDSSIHAAN | | (28/38) |
| | | | | EHTKKH | | |
| 58 | Zm/ACG44133.1 | 40.7% to | 5-42^{a} | CDVCAAEAASVFCCA | 292 | 76% |
| | | G1888 | | DEAALCDACDDRVHR | | (29/38) |
| | | | | ANKLAGKH | | |
| 58 | Zm/ACG44133.1 | 40.7% to | 61-98^{b} | CDICQERRGFLFCKED | 293 | 71% |
| | | G1888 | | RAILCRECDAPVHSAN | | (27/38) |
| | | | | DMTRRH | | |
| 60 | Zm/CAW36814.1 | 44.4% to | 5-42^{a} | CDVCAAEAASVFCCA | 294 | 76% |
| | | G1888 | | DEAALCDACDDRVHR | | (29/38) |
| | | | | ANKLAGKH | | |
| 60 | Zm/CAW36814.1 | 44.4% to | 61-98^{b} | CDICQERRGFLFCKED | 295 | 71% |
| | | G1888 | | RAILCRECDAPVHSAN | | (27/38) |
| | | | | DMTRRH | | |
| 68 | Pt/Pt_195637 | 51.0% to | 5-42^{a} | CDVCDNVEATVFCCA | 296 | 76% |
| | | G1888 | | DEAALCDGCDHRVHH | | (29/38) |
| | | | | ANKLASKH | | |
| 68 | Pt/Pt_195637 | 51.0% to | 58-95^{b} | CDICQERRALLFCQED | 297 | 89% |
| | | G1888 | | RAILCRECDLPIHKAN | | (34/38) |
| | | | | EHTQKH | | |
| 70 | Pt/Pt_550941 | 39.5% to | 5-42^{a} | CDVCNKEEASVFCTA | 298 | 76% |
| | | G1888 | | DEAALCDTCDHRVHH | | (29/38) |
| | | | | ANKLASKH | | |
| 70 | Pt/Pt_550941 | 39.5% to | 58-95^{b} | CDICQEKRAFLFCQQD | 299 | 82% |
| | | G1888 | | RAILCRECDGPIHTAN | | (31/38) |
| | | | | EHTQKH | | |
| 72 | Pt/Pt_801530 | 38.2% to | 5-42^{a} | CDVCSKEEASVFCTAD | 300 | 76% |
| | | G1888 | | EAALCDTCDHRVHHA | | (29/38) |
| | | | | NKLASKH | | |
| 72 | Pt/Pt_801530 | 38.2% to | 58-95^{b} | CDICQDKRAFLFCQQD | 301 | 76% |
| | | G1888 | | RAILCRDCDGPIHTAN | | (29/38) |
| | | | | EHTQKH | | |
| 74 | Pt/Pt_804174 | 54.5% to | 5-42^{a} | CDVCDKVEATVFCCA | 302 | 76% |
| | | G1888 | | DEAALCDGCDHRVHH | | (29/38) |
| | | | | ANTLASKH | | |
| 74 | Pt/Pt_804174 | 54.5% to | 58-95^{b} | CDICQERRAVLFCQED | 303 | 84% |
| | | G1888 | | RAILCRECDLPIHKVN | | (32/38) |
| | | | | EHTQKH | | |
| 76 | Os/Os02g43170.1 | 37.5% to | 5-42^{a} | CDVCAAEAASVFCCA | 304 | 76% |
| | | G1888 | | DEAALCDACDHRVHR | | (29/38) |
| | | | | ANKLAGKH | | |
| 76 | Os/Os02g43170.1 | 37.5% to | 65-102^{b} | CDICQEKRGFLFCKED | 305 | 68% |
| | | G1888 | | RAILCRECDVPVHTAS | | (26/38) |
| | | | | ELTMRH | | |
| 78 | Os/Os02g43170.2 | 43.4% to | 5-42^{a} | CDVCAAEAASVFCCA | 306 | 76% |
| | | G1888 | | DEAALCDACDHRVHR | | (29/38) |
| | | | | ANKLAGKH | | |
| 78 | Os/Os02g43170.2 | 43.4% to | 65-102^{b} | CDICQEKRGFLFCKED | 307 | 68% |
| | | G1888 | | RAILCRECDVPVHTAS | | (26/38) |
| | | | | ELTMRH | | |
| 80 | Os/Os04g45690.1 | 37.7% to | 5-42^{a} | CDVCAAEAASVFCCA | 308 | 79% |
| | | G1888 | | DEAALCDACDRRVHS | | (30/38) |
| | | | | ANKLAGKH | | |
| 80 | Os/Os04g45690.1 | 37.7% to | 63-100^{b} | CDICQEKRGFLFCKED | 309 | 63% |
| | | G1888 | | RAILCRECDVTVHTTS | | (24/38) |
| | | | | ELTRRH | | |
| 82 | Os/05159 | 37.7% to | 5-42^{a} | CDVCAAEAASVFCCA | 310 | 79% |
| | | G1888 | | DEAALCDACDRRVHS | | (30/38) |
| | | | | ANKLAGKH | | |
| 82 | Os/05159 | 37.7% to | 63-100^{b} | CDICQEKRGFLFCKED | 311 | 63% |
| | | G1888 | | RAILCRECDVTVHTTS | | (24/38) |
| | | | | ELTRRH | | |
| 84 | Os/Os06g49880.1 | 31.8% to | 5-42^{a} | CDVCAAEPAAVLCCA | 312 | 68% |
| | | G1888 | | DEAALCSACDRRVHR | | (26/38) |
| | | | | ANRLASKH | | |
| 84 | Os/Os06g49880.1 | 31.8% to | 66-103^{b} | CDVCREKRGLVFCVE | 313 | 66% |
| | | G1888 | | DRAILCADCDEPIHSA | | (25/38) |
| | | | | NDLTAKH | | |
| 86 | Os/Os06g49880.2 | 31.9% to | 5-42^{a} | CDVCAAEPAAVLCCA | 314 | 68% |
| | | G1888 | | DEAALCSACDRRVHR | | (26/38) |
| | | | | ANRLASKH | | |
| 86 | Os/Os06g49880.2 | 31.9% to | 66-103^{b} | CDVCREKRGLVFCVE | 315 | 66% |
| | | G1888 | | DRAILCADCDEPIHSA | | (25/38) |
| | | | | NDLTAKH | | |
| 88 | G/mGlyma04g0 | 40.1% to | 5-42^{a} | CAVCDKVEASVFCSA | 316 | 79% |
| | 1120.1 | G1888 | | DEAALCHSCDRTIHHA | | (30/38) |
| | | | | NKLATKH | | |
| 88 | G/mGlyma04g0 | 40.1% to | 58-95^{b} | CDICQERRAYLFCQED | 317 | 84% |
| | 1120.1 | G1888 | | RALLCRECDVPIHRAN | | (32/38) |
| | | | | EHTQKH | | |
| 90 | Gm/G5365 | 39.4% to | 5-42^{a} | CDVCNKHQASHFFCTA | 318 | 71% |
| | | G1888 | | DEAALCDGCDHRVHH | | (27/38) |
| | | | | ANKLASKH | | |
| 90 | Gm/G5365 | 39.4% to | 58-95^{b} | CDVCQERRAFVFCQQ | 319 | 71% |
| | | G1888 | | DRAILCKECDVPIHSA | | (27/38) |
| | | | | NDLTKNH | | |
| 92 | Gm/Glyma04g0 | 41.7% to | 5-42^{a} | CDVCNKHQASPPCTA | 320 | 71% |
| | 2960.2 | G1888 | | DEAALCDGCDHRVHH | | (27/38) |
| | | | | ANKLASKH | | |
| 92 | Gm/Glyma04g0 | 41.7% to | 58-95^{b} | CDVCQERRAFVFCQQ | 321 | 71% |
| | 2960.2 | G1888 | | DRAILCKECDVPIHSA | | (27/38) |
| | | | | NDLTKNH | | |
| 94 | Gm/Glyma06g0 | 49.4% to | 5-42^{a} | CDVCDKVEASVFCPA | 322 | 76% |
| | 1140.1 | G1888 | | DEAALCHSCDRTIHRA | | (29/38) |
| | | | | NKLATKH | | |
| 94 | Gm/Glyma06g0 | 49.4% to | 58-95^{b} | CDICQERRAYLFCQED | 323 | 84% |
| | 1140.1 | G1888 | | RALLCRECDVPIHRAN | | (32/38) |
| | | | | EHTQKH | | |
| 96 | Gm/G5367 | 39.1% to | 5-42^{a} | CDVCNKQQASLFCTA | 324 | 71% |
| | | G1888 | | DEAALCDGCDHRVHH | | (27/38) |
| | | | | ANKLASKH | | |
| 96 | Gm/G5367 | 39.1% to | 58-95^{b} | CDVCQERRAFVFCQQ | 325 | 68% |
| | | G1888 | | DRAILCKECDVPVHSA | | (26/38) |
| | | | | NDLTKNH | | |
| 98 | Gm/Glyma11g1 | 40.8% to | 5-42^{a} | CDVCHNEVASFFCPSD | 326 | 63% |
| | 2060.1 | G1888 | | EASLCHACDRTIHHAN | | (24/38) |
| | | | | KLADKH | | |
| 98 | Gm/Glyma11g1 | 40.8% to | 58-95^{b} | CDICHERRAYLFCKED | 327 | 82% |
| | 2060.1 | G1888 | | RAILCRECDLSIHGVN | | (31/38) |
| | | | | EHTKKH | | |
| 100 | Gm/G5396 | 43.0% to | 5-42^{a} | CDVCNKHEASVFCTA | 328 | 76% |
| | | G1888 | | DEAALCDGCDHRVHH | | (29/38) |
| | | | | ANKLASKH | | |
| 100 | Gm/G5396 | 43.0% to | 58-95^{b} | CDICQERRAFTFCQQD | 329 | 76% |
| | | G1888 | | RAILCKECDVSIHSAN | | (29/38) |
| | | | | EHTLKH | | |
| 102 | Gm/G5400 | 43.0% to | 5-42^{a} | CDVCNKHEASVFCTA | 330 | 76% |
| | | G1888 | | DEAALCDGCDHRVHH | | (29/38) |
| | | | | ANKLASKH | | |
| 102 | Gm/G5400 | 43.0% to | 58-95^{b} | CDICQERRAFTFCQQD | 331 | 76% |
| | | G1888 | | RAILCKECDVSIHSAN | | (29/38) |
| | | | | EHTLKH | | |

AtBBX26 (G1486) clade (clade identifier G1486):

| | | | | | | |
|---|---|---|---|---|---|---|
| 52 | At/G1486 | 100.0% to | 5-41 | CHTCRHVTAVIHCVTE | 332 | 100% |
| | | G1486 | | ALNFCLTCDNLRHHN | | (37/37) |
| | | | | NIHAEH | | |

AtBBX30 (G1478) or AtBBX31 (G1929) clade (clade identifier G1478):

| | | | | | | |
|---|---|---|---|---|---|---|
| 40 | At/G1478 | 100.0% to | 32-68 | CELCGENATVYCEAD | 333 | 100% |
| | | G1478 | | AAFLCRKCDRWVHSA | | (37/37) |
| | | | | NFLARRH | | |
| 42 | At/G1929 | 62.3% to | 31-67 | CELCDGDASVFCEADS | 334 | 78% |
| | | G1478 | | AFLCRKCDRWVHGAN | | (29/37) |
| | | | | FLAWRH | | |
| 44 | Pt/Pt_562313 | 43.2% to | 32-68 | CELCGSRASLYCQAD | 335 | 73% |
| | | G1478 | | DAFLCQKCDKWVHG | | (27/37) |
| | | | | ANFLAQRH | | |
| 46 | Pt/Pt_594447 | 44.1% to | 31-67 | CELCGSRATLYCQAD | 336 | 76% |
| | | G1478 | | HAFLCQKCDGWVHG | | (28/37) |
| | | | | ANFLALRH | | |
| 48 | Gm/Glyma12g3 | 43.8% to | 30-66 | CELCGLQASLYCQAD | 337 | 68% |
| | 2230.1 | G1478 | | DAYLCKKCDKRVHEA | | (25/37) |
| | | | | NFLALRH | | |
| 50 | Gm/G4019 | 40.6% to | 30-66 | CELCGLQASLYCQAD | 338 | 70% |
| | | G1478 | | DAYLCRKCDKRVHEA | | (26/37) |
| | | | | NFLALRH | | |

AtBBX7 (G2440) or AtBBX8 (G1479) Glade (Glade identifier G2440):

| | | | | | | |
|---|---|---|---|---|---|---|
| 104 | At/G2440 | 100.0% to | 5-42^{a} | CDFCGEQRSMVYCRS | 339 | 100% |
| | | G2440 | | DAACLCLSCDRSVHSA | | (38/38) |
| | | | | NALSKRH | | |
| 104 | At/G2440 | 100.0% to | 48-94^{b} | CERCNAQPATVRCVE | 340 | 96% |
| | | G2440 | | ERVSLCQNCDWSGHN | | (45/47) |
| | | | | NSNNNNSSSSSTSPQQH | | |
| 104 | At/G2440 | 100.0% to | 315-356^{c} | RNNAVMRYKEKKKA | 341 | 100% |
| | | G2440 | | RKFDKRVRYASRKAR | | (42/42) |
| | | | | ADVRRRVKGRFVK | | |
| 106 | At/G1479 | 70.1% to | 5-42^{a} | CDFCGEQRSMVYCRS | 342 | 97% |
| | | G2440 | | DAACLCLSCDRNVHS | | (37/38) |
| | | | | ANALSKRH | | |
| 106 | At/G1479 | 70.1% to | 48-87^{b} | CERCNAQPASVRCSDE | 343 | 80% |
| | | G2440 | | RVSLCQNCDWSGHDG | | (32/40) |
| | | | | KNSTTTSHH | | |
| 106 | At/G1479 | 70.1% to | 316-357^{c} | RNNAVMRYKEKKKA | 344 | 95% |
| | | G2440 | | RKFDKRVRYVSRKER | | (40/42) |
| | | | | ADVRRRVKGRFVK | | |
| 108 | Zm/ACF80403.1 | 49.6% to | 5-42^{a} | CGFCGKQRSMIYCRSD | 345 | 87% |
| | | G2440 | | AASLCLSCDRSVHSAN | | (33/38) |
| | | | | ALSRRH | | |
| 108 | Zm/ACF80403.1 | 49.6% to | 48-856^{b} | CDRCGLQPASVRCLED | 346 | 55% |
| | | G2440 | | NTSLCQNCDWNGHDA | | (21/38) |
| | | | | ASGASGH | | |
| 108 | Zm/ACF80403.1 | 49.6% to | 349-390^{c} | RDSALTRYKEKKKKR | 347 | 76% |
| | | G2440 | | MFDKKIRYASRKARA | | (32/42) |
| | | | | DVRKRVKGRFIK | | |
| 110 | Zm/ACG34885.1 | 50.4% to | 5-42^{a} | CDFCGEQRSMVYCRS | 348 | 92% |
| | | G2440 | | DAASLCLSCDRNVHS | | (35/38) |
| | | | | ANALSRRH | | |
| 110 | Zm/ACG34885.1 | 50.4% to | 48-85^{b} | CDRCASQPAMVRCLA | 349 | 58% |
| | | G2440 | | ENASLCQNCDWNGHI | | (22/38) |
| | | | | AGSSSAGH | | |
| 110 | Zm/ACG34885.1 | 50.4% to | 350-391^{c} | RDSALTRYKEKKMRR | 350 | 79% |
| | | G2440 | | KFDKKIRYASRKARA | | (33/42) |
| | | | | DVRKRVKGRFVK | | |
| 114 | Zm/ACN25813.1 | 47.1% to | 5-42^{a} | CDFCGKQRSMIYCRSD | 351 | 87% |
| | | G2440 | | AASLCLSCDRNVHSA | | (33/38) |
| | | | | NALSRRH | | |
| 114 | Zm/ACN25813.1 | 47.1% to | 48-85^{b} | CDRCGSQPASVRCLED | 352 | 55% |
| | | G2440 | | NASLCQNCDWNGHD | | (21/38) |
| | | | | AESGASGH | | |
| 114 | Zm/ACN25813.1 | 47.1% to | 372-391^{c} | YASRKARADVRKRVK | 353 | 90% |
| | | G2440 | | GRFIK | | (18/20) |
| 120 | Pt/Pt_247140 | 59.7% to | 5-42^{a} | CDFCGEQRSMVYCRS | 354 | 95% |
| | | G2440 | | DAASLCLSCDRNVHS | | (36/38) |
| | | | | ANALSKRH | | |
| 120 | Pt/Pt_247140 | 59.7% to | 48-85^{b} | CERCNSQPALVRCAEE | 355 | 74% |
| | | G2440 | | RISLCQNCDWIGHGTS | | (28/38) |
| | | | | TSASTH | | |
| 120 | Pt/Pt_247140 | 59.7% to | 322-363^{c} | RSDAVMRYKEKKKTR | 356 | 86% |
| | | G2440 | | MFEKKVRYASRKARA | | (36/42) |
| | | | | DVRRRVKGRFVK | | |
| 122 | Pt/Pt_409151 | 59.9% to | 5-42^{a} | CDFCGEQRSMVYCRS | 357 | 95% |
| | | G2440 | | DAACLCLSCDQIVHSA | | (36/38) |
| | | | | NALSKRH | | |
| 122 | Pt/Pt_409151 | 59.9% to | 48-85^{b} | CERCNSQPALVRRVEE | 358 | 71% |
| | | G2440 | | RISLCQNCDWMGYGS | | (27/38) |
| | | | | STSASTH | | |
| 122 | Pt/Pt_409151 | 59.9% to | 322-363^{c} | RSDAVKRYMEKKKTR | 359 | 83% |
| | | G2440 | | KFEKKVRYASRKARA | | (35/42) |
| | | | | DVRRRVKGRFVK | | |
| 124 | Os/Os02g49230.1 | 51.7% to | 5-42^{a} | CDFCREQRSMVYCRS | 360 | 89% |
| | | G2440 | | DAASLCLSCDRNVHS | | (34/38) |
| | | | | ANALSRRH | | |
| 124 | Os/Os02g49230.1 | 51.7% to | 48-85^{b} | CDRCVGQPAAVRCLE | 361 | 61% |
| | | G2440 | | ENTSLCQNCDWNGHG | | (23/38) |
| | | | | AASSAAGH | | |
| 124 | Os/Os02g49230.1 | 51.7% to | 350-391^{c} | RDNALTRYKEKKKRR | 362 | 83% |
| | | G2440 | | KFDKKIRYASRKARA | | (35/42) |
| | | | | DVRKRVKGRFVK | | |
| 126 | Os/Os02g49230.2 | 44.2% to | 78-115^{a} | CDFCREQRSMVYCRS | 363 | 89% |
| | | G2440 | | DAASLCLSCDRNVHS | | (34/38) |
| | | | | ANALSRRH | | |
| 126 | Os/Os02g49230.2 | 44.2% to | 121-158^{b} | CDRCVGQPAAVRCLE | 364 | 61% |
| | | G2440 | | ENTSLCQNCDWNGHG | | (23/38) |
| | | | | AASSAAGH | | |
| 126 | Os/Os02g49230.2 | 44.2% to | 423-464^{c} | RDNALTRYKEKKKRR | 365 | 83% |
| | | G2440 | | KFDKKIRYASRKARA | | (35/42) |
| | | | | DVRKRVKGRFVK | | |
| 128 | Os/Os02g49230.3 | 51.7% to | 5-42^{a} | CDFCREQRSMVYCRS | 366 | 89% |
| | | G2440 | | DAASLCLSCDRNVHS | | (34/38) |
| | | | | ANALSRRH | | |
| 128 | Os/Os02g49230.3 | 51.7% to | 48-85^{b} | CDRCVGQPAAVRCLE | 367 | 61% |
| | | G2440 | | ENTSLCQNCDWNGHG | | (23/38) |
| | | | | AASSAAGH | | |
| 128 | Os/Os02g49230.3 | 51.7% to | 350-391^{c} | RDNALTRYKEKKKRR | 368 | 83% |
| | | G2440 | | KFDKKIRYASRKARA | | (35/42) |
| | | | | DVRKRVKGRFVK | | |
| 130 | Os/Os02g49230.4 | 51.7% to | 5-42^{a} | CDFCREQRSMVYCRS | 369 | 89% |
| | | G2440 | | DAASLCLSCDRNVHS | | (34/38) |
| | | | | ANALSRRH | | |
| 130 | Os/Os02g49230.4 | 51.7% to | 48-85^{b} | CDRCVGQPAAVRCLE | 370 | 61% |
| | | G2440 | | ENTSLCQNCDWNGHG | | (23/38) |
| | | | | AASSAAGH | | |
| 130 | Os/Os02g49230.4 | 51.7% to | 350-391^{c} | RDNALTRYKEKKKRR | 371 | 83% |
| | | G2440 | | KFDKKIRYASRKARA | | (35/42) |
| | | | | DVRKRVKGRFVK | | |
| 132 | Os/Os02g49230.5 | 51.8% to | 5-42^{a} | CDFCREQRSMVYCRS | 372 | 89% |
| | | G2440 | | DAASLCLSCDRNVHS | | (34/38) |
| | | | | ANALSRRH | | |
| 132 | Os/Os02g49230.5 | 51.8% to | 48-85^{b} | CDRCVGQPAAVRCLE | 373 | 61% |
| | | G2440 | | ENTSLCQNCDWNGHG | | (23/38) |
| | | | | AASSAAGH | | |
| 132 | Os/Os02g49230.5 | 51.8% to | 349-390^{c} | RDNALTRYKEKKKRR | 374 | 83% |
| | | G2440 | | KFDKKIRYASRKARA | | (35/42) |
| | | | | DVRKRVKGRFVK | | |
| 134 | Os/Os02g49230.6 | 51.7% to | 5-42^{a} | CDFCREQRSMVYCRS | 375 | 89% |
| | | G2440 | | DAASLCLSCDRNVHS | | (34/38) |
| | | | | ANALSRRH | | |
| 134 | Os/Os02g49230.6 | 51.7% to | 48-85⁶ | CDRCVGQPAAVRCLE | 376 | 61% |
| | | G2440 | | ENTSLCQNCDWNGHG | | (23/38) |
| | | | | AASSAAGH | | |
| 134 | Os/Os02g49230.6 | 51.7% to | 350-391^{c} | RDNALTRYKEKKKRR | 377 | 83% |
| | | G2440 | | KFDKKIRYASRKARA | | (35/42) |
| | | | | DVRKRVKGRFVK | | |
| 136 | Os/Os06g19444.1 | 51.7% to | 5-42^{a} | CDFCGEQRSMVYCRS | 378 | 92% |
| | | G2440 | | DAASLCLSCDRNVHS | | (35/38) |
| | | | | ANALSRRH | | |
| 136 | Os/Os06g19444.1 | 51.7% to | 48-85^{b} | CDRCASQPAMVRCLV | 379 | 58% |
| | | G2440 | | ENASLCQNCDWNGHS | | (22/38) |
| | | | | AGSSAAGH | | |
| 136 | Os/Os06g19444.1 | 51.7% to | 373-392^{c} | YASRKARADVRKRVK | 380 | 95% |
| | | G2440 | | GRFVK | | (19/20) |
| 138 | Os/Os06g19444.2 | 51.8% to | 5-42^{a} | CDFCGEQRSMVYCRS | 381 | 92% |
| | | G2440 | | DAASLCLSCDRNVHS | | (35/38) |
| | | | | ANALSRRH | | |
| 138 | Os/Os06g19444.2 | 51.8% to | 48-85^{b} | CDRCASQPAMVRCLV | 382 | 58% |
| | | G2440 | | ENASLCQNCDWNGHS | | (22/38) |
| | | | | AGSSAAGH | | |
| 138 | Os/Os06g19444.2 | 51.8% to | 372-391^{c} | YASRKARADVRKRVK | 383 | 95% |
| | | G2440 | | GRFVK | | (19/20) |
| 140 | Gm/Glyma02g3 | 56.3% to | 5-42^{a} | CDFCGDQRSLVYCRS | 384 | 87% |
| | 8870.1 | G2440 | | DSACLCLSCDRNVHSA | | (33/38) |
| | | | | NALSRRH | | |
| 140 | Gm/Glyma02g3 | 56.3% to | 48-85^{b} | CERCNSQPAFVRSVEE | 385 | 68% |
| | 8870.1 | G2440 | | KISLCQNCDWLGHGTS | | (26/38) |
| | | | | PSSSMH | | |
| 140 | Gm/Glyma02g3 | 56.3% to | 348-389^{c} | RSNAVMRYKEKKKTR | 386 | 88% |
| | 8870.1 | G2440 | | KFEKKVRYASRKARA | | (37/42) |
| | | | | DVRKRVKGRFVK | | |
| 142 | Gm/Glyma13g1 | 36.6% to | | | | |
| | 1590.1 | G2440 | | | | |
| 142 | Gm/Glyma13g1 | 36.6% to | | | | |
| | 1590.1 | G2440 | | | | |
| 142 | Gm/Glyma13g1 | 36.6% to | 224-265^{c} | RSNAVMRYKEKKKTR | 387 | 90% |
| | 1590.1 | G2440 | | MFDKKVRYASRKARA | | (38/42) |
| | | | | DVRRRVKGRFVK | | |
| 144 | Gm/Glyma14g3 | 55.3% to | 5-42^{a} | CDFCGDQRSLVYCRS | 388 | 89% |
| | 6930.1 | G2440 | | DAACLCLSCDRNVHS | | (34/38) |
| | | | | ANALSRRH | | |
| 144 | Gm/Glyma14g3 | 55.3% to | 48-85^{b} | CERCNSQPAFVRCVDE | 389 | 68% |
| | 6930.1 | G2440 | | KISLCQNCDWLGHGTS | | (26/38) |
| | | | | PSSSTH | | |
| 144 | Gm/Glyma14g3 | 55.3% to | 354-395^{c} | RSNAVMRYKEKKKTR | 390 | 88% |
| | 6930.1 | G2440 | | KFEKKVRYASRKARA | | (37/42) |
| | | | | DVRKRVKGRFVK | | |
| 146 | Gm/Glyma14g3 | 55.3% to | 5-42^{a} | CDFCGDQRSLVYCRS | 391 | 89% |
| | 6930.2 | G2440 | | DAACLCLSCDRNVHS | | (34/38) |
| | | | | ANALSRRH | | |
| 146 | Gm/Glyma14g3 | 55.3% to | 48-85^{b} | CERCNSQPAFVRCVDE | 392 | 68% |
| | 6930.2 | G2440 | | KISLCQNCDWLGHGTS | | (26/38) |
| | | | | PSSSTH | | |
| 146 | Gm/Glyma14g3 | 55.3% to | 354-395^{c} | RSNAVMRYKEKKKTR | 393 | 88% |
| | 6930.2 | G2440 | | KFEKKVRYASRKARA | | (37/42) |
| | | | | DVRKRVKGRFVK | | |
| 148 | Gm/Glyma20g0 | 37.4% to | | | | |
| | 7050.1 | G2440 | | | | |
| 148 | Gm/Glyma20g0 | 37.4% to | | | | |
| | 7050.1 | G2440 | | | | |
| 148 | Gm/Glyma20g0 | 37.4% to | 226-267^{c} | RSNAVMRYKEKKKTR | 394 | 90% |
| | 7050.1 | G2440 | | MFDKKVRYASRKARA | | (38/42) |
| | | | | DVRRRVKGRFVK | | |
| 150 | Gm/Glyma20g0 | 37.4% to | | | | |
| | 7050.2 | G2440 | | | | |
| 150 | Gm/Glyma20g0 | 37.4% to | | | | |
| | 7050.2 | G2440 | | | | |
| 150 | Gm/Glyma20g0 | 37.4% to | 226-267^{c} | RSNAVMRYKEKKKTR | 395 | 90% |
| | 7050.2 | G2440 | | MFDKKVRYASRKARA | | (38/42) |
| | | | | DVRRRVKGRFVK | | |

AtBBX19 (G902) or AtBBX18 (G1881) clade (clade identifier G902):

| | | | | | | |
|---|---|---|---|---|---|---|
| 200 | At/G902 | 100.0% to | 5-42^{a} | CDACENAAAIIFCAAD | 396 | 100% |
| | | G902 | | EAALCRPCDEKVHMC | | (38/38) |
| | | | | NKLASRH | | |
| 200 | At/G902 | 100.0% to | 56-91^{b} | CDICENAPAFFYCEIDG | 397 | 100% |
| | | G902 | | SSLCLQCDMVVHVGG | | (36/36) |
| | | | | KRTH | | |
| 202 | At/G1881 | 70.1% to | 5-42^{a} | CDACESAAAIVFCAAD | 398 | 87% |
| | | G902 | | EAALCCSCDEKVHKC | | (33/38) |
| | | | | NKLASRH | | |
| 202 | At/G1881 | 70.1% to | 56-91^{b} | CDICENAPAFFYCEIDG | 399 | 100% |
| | | G902 | | SSLCLQCDMVVHVGG | | (36/36) |
| | | | | KRTH | | |
| 204 | Zm/ACF85933.1 | 57.5% to | 5-42^{a} | CDVCESAPAVLFCAA | 400 | 87% |
| | | G902 | | DEAALCRPCDEKVHM | | (33/38) |
| | | | | CNKLASRH | | |
| 204 | Zm/ACF85933.1 | 57.5% to | 56-91^{b} | CDICENSPAFFYCEIDG | 401 | 89% |
| | | G902 | | TSLCLSCDMTVHVGG | | (32/36) |
| | | | | KRTH | | |
| 208 | Zm/ACL52378.1 | 57.8% to | 5-42^{a} | CDVCESAPAVLFCAA | 402 | 87% |
| | | G902 | | DEAALCRPCDEKVHM | | (33/38) |
| | | | | CNKLASRH | | |
| 208 | Zm/ACL52378.1 | 57.8% to | 56-91^{b} | CDICENSPAFFYCEIDG | 403 | 89% |
| | | G902 | | TSLCLSCDMTVHVGG | | (32/36) |
| | | | | KRTH | | |
| 212 | Pt/Pt_648693 | 61.4% to | 5-42^{a} | CDVCESAAAILFCAAD | 404 | 89% |
| | | G902 | | EAALCRSCDEKVHMC | | (34/38) |
| | | | | NKLASRH | | |
| 212 | Pt/Pt_648693 | 61.4% to | 56-91^{b} | CDICEKAPAFFYCEIDG | 405 | 94% |
| | | G902 | | SSLCLQCDMIVHVGG | | (34/36) |
| | | | | KRTH | | |
| 214 | Pt/Pt_721866 | 61.0% to | 5-42^{a} | CDVCESAAAILFCAAD | 406 | 87% |
| | | G902 | | EAALCRSCDEKVHLC | | (33/38) |
| | | | | NKLASRH | | |
| 214 | Pt/Pt_721866 | 61.0% to | 56-91^{b} | CDICENAPAFFYCEIDG | 407 | 97% |
| | | G902 | | SSLCLQCDMIVHVGG | | (35/36) |
| | | | | KRTH | | |
| 216 | Pt/Pt_741179 | 54.5% to | 5-42^{a} | CDACESAFAIVFCAAD | 408 | 84% |
| | | G902 | | EAALCLACDKKVHMC | | (32/38) |
| | | | | NKLASRH | | |
| 216 | Pt/Pt_741179 | 54.5% to | 56-91^{b} | CDICENAPAFFYCETD | 409 | 94% |
| | | G902 | | GSSLCLQCDMTVHVG | | (34/36) |
| | | | | GKRTH | | |
| 218 | Pt/Pt_820080 | 56.2% to | 5-42^{a} | CDACESAAAIVFCAAD | 410 | 89% |
| | | G902 | | EAALCLACDEKVHMC | | (34/38) |
| | | | | NKLASRH | | |
| 218 | Pt/Pt_820080 | 56.2% to | 56-91^{b} | CDICENAPAFFYCETD | 411 | 94% |
| | | G902 | | GSSLCLQCDMTVHVG | | (34/36) |
| | | | | GKRTH | | |
| 220 | Os/Os09g35880.1 | 57.1% to | 5-42^{a} | CDVCESAPAVLFCVA | 412 | 79% |
| | | G902 | | DEAALCRSCDEKVHM | | (30/38) |
| | | | | CNKLARRH | | |
| 220 | Os/Os09g35880.1 | 57.1% to | 56-91^{b} | CDICENAPAFFYCEIDG | 413 | 92% |
| | | G902 | | TSLCLSCDMTVHVGG | | (33/36) |
| | | | | KRTH | | |
| 222 | Gm/Glyma01g3 | 55.2% to | 5-42^{a} | CDACESAAAIVFCAAD | 414 | 92% |
| | 7370.1 | G902 | | EAALCRACDEKVHMC | | (35/38) |
| | | | | NKLASRH | | |
| 222 | Gm/Glyma01g3 | 55.2% to | 56-91^{b} | CDICENAPAFFYCETD | 415 | 94% |
| | 7370.1 | G902 | | GSSLCLQCDMIVHVG | | (34/36) |
| | | | | GKRTH | | |
| 224 | Gm/Glyma11g0 | 56.7% to | 5-42^{a} | CDACESAAAIVFCAAD | 416 | 92% |
| | 7930.1 | G902 | | EAALCRACDEKVHMC | | (35/38) |
| | | | | NKLASRH | | |
| 224 | Gm/Glyma11g0 | 56.7% to | 56-91^{b} | CDICENAPAFFYCETD | 417 | 94% |
| | 7930.1 | G902 | | GSSLCLQCDMIVHVG | | (34/36) |
| | | | | GKRTH | | |
| 226 | Gm/Glyma11g0 | 55.7% to | 5-42^{a} | CDACESAAAIVFCAAD | 418 | 92% |
| | 7930.2 | G902 | | EAALCRACDEKVHMC | | (35/38) |
| | | | | NKLASRH | | |
| 226 | Gm/Glyma11g0 | 55.7% to | 56-91^{b} | CDICENAPAFFYCETD | 419 | 94% |
| | 7930.2 | G902 | | GSSLCLQCDMIVHVG | | (34/36) |
| | | | | GKRTH | | |
| 228 | Gm/Glyma11g0 | 55.7% to | 5-42^{a} | CDACESAAAIVFCAAD | 420 | 92% |
| | 7930.3 | G902 | | EAALCRACDEKVHMC | | (35/38) |
| | | | | NKLASRH | | |
| 228 | Gm/Glyma11g0 | 55.7% to | 56-91^{b} | CDICENAPAFFYCETD | 421 | 94% |
| | 7930.3 | G902 | | GSSLCLQCDMIVHVG | | (34/36) |
| | | | | GKRTH | | |
| 230 | Gm/Glyma11g0 | 56.2% to | 5-42^{a} | CDACESAAAIVFCAAD | 422 | 92% |
| | 7930.4 | G902 | | EAALCRACDEKVHMC | | (35/38) |
| | | | | NKLASRH | | |
| 230 | Gm/Glyma11g0 | 56.2% to | 56-91^{b} | CDICENAPAFFYCETD | 423 | 94% |
| | 7930.4 | G902 | | GSSLCLQCDMIVHVG | | (34/36) |
| | | | | GKRTH | | |
| 232 | Gm/Glyma11g1 | 58.0% to | 5-42^{a} | CDVCESAAAILFCAAD | 424 | 82% |
| | 1850.1 | G902 | | EAALCSACDHKIHMC | | (31/38) |
| | | | | NKLASRH | | |
| 232 | Gm/Glyma11g1 | 58.0% to | 56-91^{b} | CDICENAPAFFYCEIDG | 425 | 97% |
| | 1850.1 | G902 | | SSLCLQCDMIVHVGG | | (35/36) |
| | | | | KRTH | | |
| 234 | Gm/Glyma12g0 | 62.2% to | 5-42^{a} | CDVCESAAAIVFCAAD | 426 | 82% |
| | 4130.1 | G902 | | EAALCSACDHKIHMC | | (31/38) |
| | | | | NKLASRH | | |
| 234 | Gm/Glyma12g0 | 62.2% to | 56-91^{b} | CDICENAPAFFYCEIDG | 427 | 97% |
| | 4130.1 | G902 | | SSLCLQCDMIVHVGG | | (35/36) |
| | | | | KRTH | | |

Species abbreviations for Table 1: At—Arabidopsis thaliana; Gm—Glycine max; Os—Oryza sativa; Pt—Populus trichocarpa; Sl—Solanum lycopersicum; Zm—Zea mays.
^{a}first B-box type ZF domain
^{b}second B-box type ZF domain
^{c}putative CCT nuclear localization domain

[0100] Exemplary polynucleotides encoding the polypeptides of soybean B-box proteins (GmBBX) as represented in Table 2 were identified from yeast two hybrid screens and from phylogenetic analysis.

TABLE 2
Glycine max B-box polynucleotide and
polypeptide sequences (GmBBX).

| Column 1 | Column 2 | | |
|---|---|---|---|
| Polynucleotide | Polypeptide | Column 3 | Column 4 |
| SEQ ID NO: | SEQ ID NO: | Gene Name | Domains |
| 435 | 436 | GmBBX1 | zf-B_box[2]::CCT |
| 437 | 438 | GmBBX2 | zf-B_box[2]::CCT |
| 439 | 440 | GmBBX3 | zf-B_box[2]::CCT |
| 441 | 442 | GmBBX4 | zf-B_box[2]::CCT |
| 443 | 444 | GmBBX5 | zf-B_box[2]::CCT |
| 445 | 446 | GmBBX6 | zf-B_box[2]::CCT |
| 447 | 448 | GmBBX7 | zf-B_box[2] |
| 449 | 450 | GmBBX11 | zf-B_box[2]::CCT |
| 451 | 452 | GmBBX12 | zf-B_box[2]::CCT |
| 453 | 454 | GmBBX13 | zf-B_box[1]::CCT |
| 455 | 456 | GmBBX14 | zf-B_box[1]::CCT |
| 457 | 458 | GmBBX15 | zf-B_box[1]::CCT |
| 459 | 460 | GmBBX16 | zf-B_box[1]::CCT |
| 461 | 462 | GmBBX17 | zf-B_box[1]::CCT |
| 463 | 464 | GmBBX18 | zf-B_box[1]::CCT |
| 465 | 466 | GmBBX19 | zf-B_box[2]::CCT |
| 467 | 468 | GmBBX20 | zf-B_box[2]::CCT |
| 469 | 470 | GmBBX21 | zf-B_box[2]::CCT |
| 471 | 472 | GmBBX22 | zf-B_box[2]::CCT |
| 473 | 474 | GmBBX23 | zf-B_box[2] |
| 475 | 476 | GmBBX24 | zf-B_box[1]::CCT |
| 477 | 478 | GmBBX25 | zf-B_box[2]::CCT |
| 479 | 480 | GmBBX26 | zf-B_box[2]::CCT |
| 481 | 482 | GmBBX27 | zf-B_box[2] |
| 483 | 484 | GmBBX28 | zf-B_box[2] |
| 485 | 486 | GmBBX29 | zf-B_box[2]::CCT |
| 487 | 488 | GmBBX30 | zf-B_box[2]::CCT |
| 489 | 490 | GmBBX31 | zf-B_box[2] |
| 491 | 492 | GmBBX33 | zf-B_box[2] |
| 493 | 494 | GmBBX34 | zf-B_box[2] |
| 495 | 496 | GmBBX35 | zf-B_box[2] |
| 497 | 498 | GmBBX36 | zf-B_box[2] |
| 499 | 500 | GmBBX37 | zf-B_box[2] |
| 501 | 502 | GmBBX38 | zf-B_box[2] |
| 503 | 504 | GmBBX39 | zf-B_box[2] |
| 505 | 506 | GmBBX40 | zf-B_box[2] |
| 507 | 508 | GmBBX41 | zf-B_box[2] |
| 509 | 510 | GmBBX42 | zf-B_box[2] |
| 511 | 512 | GmBBX43 | zf-B_box[2] |
| 513 | 514 | GmBBX44 | zf-B_box[2] |
| 515 | 516 | GmBBX45 | zf-B_box[2] |
| 517 | 518 | GmBBX46 | zf-B_box[2] |
| 519 | 520 | GmBBX47 | zf-B_box[2] |
| 521 | 522 | GmBBX48 | zf-B_box[2] |
| 523 | 524 | GmBBX49 | zf-B_box[2] |
| 525 | 526 | GmBBX50 | zf-B_box[1] |
| 527 | 528 | GmBBX51 | zf-B_box[1] |
| 529 | 530 | GmBBX52 | zf-B_box[1] |
| 531 | 532 | GmBBX53 | zf-B_box[1] |
| 533 | 534 | GmBBX54 | zf-B_box[1] |
| 535 | 536 | GmBBX55 | zf-B_box[1] |
| 537 | 538 | GmBBX56 | zf-B_box[1] |
| 539 | 540 | GmBBX57 | zf-B_box[1] |
| 541 | 542 | GmBBX58 | zf-B_box[1] |
| 543 | 544 | GmBBX59 | zf-B_box[1] |
| 545 | 546 | GmBBX60 | zf-B_box[1] |
| 547 | 548 | GmBBX61 | zf-B_box[1] |
| 549 | 550 | GmBBX62 | zf-B_box[1] |

Abbreviations for Table 2
zf-B_box[1]: first B-box type zinc finger domain
zf-B_box[2]: second B-box type zinc finger domain
CCT: nuclear localization domain
Gm: Glycine max

### Orthologs and Paralogs

[0101] Homologous sequences as described above can comprise orthologous or paralogous sequences. Several different methods are known by those of skill in the art for identifying and defining these functionally homologous sequences. General methods for identifying orthologs and paralogs, including phylogenetic methods, sequence similarity and hybridization methods, are described herein; an ortholog or paralog, including equivalogs, may be identified by one or more of the methods described below.

[0102] As described by Eisen, 1998, evolutionary information may be used to predict gene function. It is common for groups of genes that are homologous in sequence to have diverse, although usually related, functions. However, in many cases, the identification of homologs is not sufficient to make specific predictions because not all homologs have the same function. Thus, an initial analysis of functional relatedness based on sequence similarity alone may not provide one with a means to determine where similarity ends and functional relatedness begins. Fortunately, it is well known in the art that protein function can be classified using phylogenetic analysis of gene trees combined with the corresponding species. Functional predictions can be greatly improved by focusing on how the genes became similar in sequence (i.e., by evolutionary processes) rather than on the sequence similarity itself (Eisen, 1998). In fact, many specific examples exist in which gene function has been shown to correlate well with gene phylogeny (Eisen, 1998). Thus, “[t]he first step in making functional predictions is the generation of a phylogenetic tree representing the evolutionary history of the gene of interest and its homologs. Such trees are distinct from clusters and other means of characterizing sequence similarity because they are inferred by techniques that help convert patterns of similarity into evolutionary relationships . . . . After the gene tree is inferred, biologically determined functions of the various homologs are overlaid onto the tree. Finally, the structure of the tree and the relative phylogenetic positions of genes of different functions are used to trace the history of functional changes, which is then used to predict functions of [as yet] uncharacterized genes” (Eisen, supra).

[0103] Within a single plant species, gene duplication may cause two copies of a particular gene, giving rise to two or more genes with similar sequence and often similar function known as paralogs. A paralog is therefore a similar gene formed by duplication within the same species. Paralogs typically cluster together or in the same clade (a group of similar genes) when a gene family phylogeny is analyzed using programs such as CLUSTAL (Thompson et al., 1994; Higgins et al., 1996). Groups of similar genes can also be identified with pair-wise BLAST analysis (Feng and Doolittle, 1987). For example, a clade of very similar MADS domain transcriptional regulators from Arabidopsis all share a common function in flowering time (Ratcliffe et al., 2001), and a group of very similar AP2 domain transcriptional regulators from Arabidopsis are involved in tolerance of plants to freezing (Gilmour et al., 1998). Analysis of groups of similar genes with similar function that fall within one clade can yield sub-sequences that are particular to the clade. These sub-sequences, known as consensus sequences, can not only be used to define the sequences within each clade, but define the functions of these genes; genes within a clade may contain paralogous sequences, or orthologous sequences that share the same function (see also, for example, Mount, 2001).

[0104] Transcriptional regulator gene sequences are conserved across diverse eukaryotic species lines (Goodrich et al., 1993; Lin et al., 1991; Sadowski et al., 1988). Plants are no exception to this observation; diverse plant species possess transcriptional regulators that have similar sequences and functions. Speciation, the production of new species from a parental species, gives rise to two or more genes with similar sequence and similar function. These genes, termed orthologs, often have an identical function within their host plants and are often interchangeable between species without losing function. Because plants have common ancestors, many genes in any plant species will have a corresponding orthologous gene in another plant species. Once a phylogenic tree for a gene family of one species has been constructed using a program such as CLUSTAL (Thompson et al., 1994; Higgins et al., 1996) potential orthologous sequences can be placed into the phylogenetic tree and their relationship to genes from the species of interest can be determined. Orthologous sequences can also be identified by a reciprocal BLAST strategy. Once an orthologous sequence has been identified, the function of the ortholog can be deduced from the identified function of the reference sequence.

[0105] By using a phylogenetic analysis, one skilled in the art would recognize that the ability to predict similar functions conferred by closely-related polypeptides is predictable. This predictability has been confirmed by our own many studies in which we have found that a wide variety of polypeptides have orthologous or closely-related homologous sequences that function as does the first, closely-related reference sequence. For example, distinct transcriptional regulators, including:

[0106] (i) AP2 family Arabidopsis G47 (found in U.S. Pat. No. 7,135,616), a phylogenetically-related sequence from soybean, and two phylogenetically-related homologs from rice all can confer greater tolerance to drought, hyperosmotic stress, or delayed flowering as compared to control plants;

[0107] (ii) CAAT family Arabidopsis G481 (found in PCT patent publication WO2004076638), and numerous phylogenetically-related sequences from dicots and monocots can confer greater tolerance to drought-related stress as compared to control plants;

[0108] (iii) Myb-related Arabidopsis G682 (found in PCT patent publication WO2004076638) and numerous phylogenetically-related sequences from dicots and monocots can confer greater tolerance to heat, drought-related stress, cold, and salt as compared to control plants;

[0109] (iv) WRKY family Arabidopsis G1274 (found in U.S. Pat. No. 7,196,245) and numerous closely-related sequences from dicots and monocots have been shown to confer increased water deprivation tolerance, and

[0110] (v) AT-hook family soy sequence G3456 (found in US Patent publication US20040128712A1) and numerous phylogenetically-related sequences from dicots and monocots, increased biomass compared to control plants when these sequences are overexpressed in plants.

[0111] The polypeptides sequences belong to distinct clades of polypeptides that include members from diverse species. In each case, most or all of the clade member sequences derived from both dicots and monocots have been shown to confer increased yield or tolerance to one or more abiotic stresses when the sequences were overexpressed. These studies each demonstrate that evolutionarily conserved genes from diverse species are likely to function similarly (i.e., by regulating similar target sequences and controlling the same traits), and that polynucleotides from one species may be transformed into closely-related or distantly-related plant species to confer or improve traits.

[0112] As shown in Table 1 and Table 2, polypeptides that are phylogenetically related to disclosed polypeptides, including SEQ ID NOs: 2n, where n=1 to 117 or 218 to 275, may have conserved domains that share at least 55%, 56%, 57%, 58%, 59%, 60%, 61%, 62%, 63%, 64%, 65%, 66%, 67%, 68%, 69%, 70%, 71%, 72%, 73%, 74%, 75%, 76%, 77%, 78%, 79%, 80%, 81%, 82%, 83%, 84%, 85%, 86%, 87%, 88%, 89%, 90%, 91%, 92%, 93%, 94%, 95%, 96%, 97%, 98%, 99%, or about 100% amino acid sequence identity to the listed sequences, for example, SEQ ID NOs: 235-427, and have similar functions in that the disclosed and closely related polypeptides may, when overexpressed, confer at least one trait selected from the group consisting of decreased sensitivity to light, increased yield, greater height, greater stem diameter, greater resistance to lodging, increased secondary rooting, greater cold tolerance, greater tolerance to water deprivation, reduced stomatal conductance, altered C/N sensing, increased low nitrogen tolerance, greater late season growth and vigor, greater number of primary nodes, greater late season canopy coverage, increased tolerance to hyperosmotic stress, altered levels of ureides, altered levels of hexose sugars, altered SPS activity, altered levels of starch, and delayed senescence, as compared to a control plant.

[0113] At the nucleotide level, sequences that are closely related to the disclosed polynucleotide sequences will typically share at least about 30% or at least 40%, at least 41%, at least 42%, at least 43%, at least 44%, at least 45%, at least 46%, at least 47%, at least 48%, or at least 49% nucleotide sequence identity, preferably at least about 50%, at least 51%, at least 52%, at least 53%, at least 54%, at least 55%, at least 56%, at least 57%, at least 58%, or at least 59% nucleotide sequence identity, or at least 60%, or at least 61%, or at least 62%, or at least 63%, or at least 64%, or at least 65%, or at least 66%, or at least 67%, or at least 68%, or at least 69%, or at least 70%, or at least 71%, or at least 72%, or at least 73%, or at least 74%, or at least 75%, or at least 76%, or at least 77%, or at least 78%, or at least 79%, or at least 80%, or at least 81%, or at least 82%, or at least 83%, or at least 84%, or at least 85%, or at least 86%, or at least 87%, or at least 88%, or at least 89%, or at least 90%, or at least 91%, or at least 92%, or at least 93%, or at least 94%, or at least 95%, or at least 96%, or at least 97%, or at least 98%, or at least 99%, or about 100% sequence identity to one or more of the listed full-length polynucleotide sequences, or to a polynucleotide sequence encoding a conserved domain of a listed polypeptide sequence. The degeneracy of the genetic code enables major variations in the nucleotide sequence of a polynucleotide while maintaining the amino acid sequence of the encoded protein. Polynucleotides that encode polypeptides that are closely-related, that is, orthologous or paralogous, to the disclosed polypeptide sequences will be identifiable by having at least any of the percentage identities provided in this paragraph.

[0114] At the polypeptide level, sequences that are closely related to the disclosed polypeptide sequences will typically share at least about 30% or at least 40%, at least 41%, at least 42%, at least 43%, at least 44%, at least 45%, at least 46%, at least 47%, at least 48%, or at least 49% amino acid sequence identity, preferably at least about 50%, at least 51%, at least 52%, at least 53%, at least 54%, at least 55%, at least 56%, at least 57%, at least 58%, or at least 59% nucleotide sequence identity, or at least 60%, or at least 61%, or at least 62%, or at least 63%, or at least 64%, or at least 65%, or at least 66%, or at least 67%, or at least 68%, or at least 69%, or at least 70%, or at least 71%, or at least 72%, or at least 73%, or at least 74%, or at least 75%, or at least 76%, or at least 77%, or at least 78%, or at least 79%, or at least 80%, or at least 81%, or at least 82%, or at least 83%, or at least 84%, or at least 85%, or at least 86%, or at least 87%, or at least 88%, or at least 89%, or at least 90%, or at least 91%, or at least 92%, or at least 93%, or at least 94%, or at least 95%, or at least 96%, or at least 97%, or at least 98%, or at least 99%, or about 100% sequence identity to one or more of the listed full-length polypeptide sequences, or to conserved domain of a listed full length sequence, or to a listed conserved domain, or to a listed polypeptide sequence but excluding or outside of the region(s) encoding a known consensus sequence or consensus DNA-binding site, or outside of the region(s) encoding one or all conserved domains. Polypeptides, or their domains, that are closely-related, that is, orthologous or paralogous, to the disclosed polypeptide sequences, or their domains, will be identifiable by having at least any of the percentage identities provided in this paragraph.

[0115] Percent identity can be determined electronically, e.g., by using the MEGALIGN program (DNASTAR, Inc. Madison, Wis.). The MEGALIGN program can create alignments between two or more sequences according to different methods, for example, the clustal method (see, for example, Higgins and Sharp, 1988). The clustal algorithm groups sequences into clusters by examining the distances between all pairs. The clusters are aligned pairwise and then in groups. Other alignment algorithms or programs may be used, including FASTA, BLAST, or ENTREZ, FASTA and BLAST, and which may be used to calculate percent similarity. These are available as a part of the GCG sequence analysis package (University of Wisconsin, Madison, Wis.), and can be used with or without default settings. ENTREZ is available through the National Center for Biotechnology Information. In one embodiment, the percent identity of two sequences can be determined by the GCG program with a gap weight of 1, e.g., each amino acid gap is weighted as if it were a single amino acid or nucleotide mismatch between the two sequences (see U.S. Pat. No. 6,262,333).

[0116] Software for performing BLAST analyses is publicly available, e.g., through the National Center for Biotechnology Information (see internet website at www.ncbi.nlm.nih.gov/). This algorithm involves first identifying high scoring sequence pairs (HSPs) by identifying short words of length W in the query sequence, which either match or satisfy some positive-valued threshold score T when aligned with a word of the same length in a database sequence. T is referred to as the neighborhood word score threshold (Altschul, 1990; Altschul et al., 1993). These initial neighborhood word hits act as seeds for initiating searches to find longer HSPs containing them. The word hits are then extended in both directions along each sequence for as far as the cumulative alignment score can be increased. Cumulative scores are calculated using, for nucleotide sequences, the parameters M (reward score for a pair of matching residues; always >0) and N (penalty score for mismatching residues; always <0). For amino acid sequences, a scoring matrix is used to calculate the cumulative score. Extension of the word hits in each direction are halted when: the cumulative alignment score falls off by the quantity X from its maximum achieved value; the cumulative score goes to zero or below, due to the accumulation of one or more negative-scoring residue alignments; or the end of either sequence is reached. The BLAST algorithm parameters W, T, and X determine the sensitivity and speed of the alignment. The BLASTN program (for nucleotide sequences) uses as defaults a wordlength (W) of 11, an expectation (E) of 10, a cutoff of 100, M=5, N=−4, and a comparison of both strands. For amino acid sequences, the BLASTP program uses as defaults a wordlength (W) of 3, an expectation (E) of 10, and the BLOSUM62 scoring matrix (see Henikoff & Henikoff, 1989). Unless otherwise indicated for comparisons of predicted polynucleotides, “sequence identity” refers to the % sequence identity generated from a tBlastx using the NCBI version of the algorithm at the default settings using gapped alignments with the filter “off” (see, for example, internet website at www.ncbi.nlm.nih.gov/).

[0117] Other techniques for alignment are described by Doolittle, 1996. Preferably, an alignment program that permits gaps in the sequence is utilized to align the sequences. The Smith-Waterman is one type of algorithm that permits gaps in sequence alignments (see Shpaer, 1997). Also, the GAP program using the Needleman and Wunsch alignment method can be utilized to align sequences. An alternative search strategy uses MPSRCH software, which runs on a MASPAR computer. MPSRCH uses a Smith-Waterman algorithm to score sequences on a massively parallel computer. This approach improves ability to pick up distantly related matches, and is especially tolerant of small gaps and nucleotide sequence errors. Nucleic acid-encoded amino acid sequences can be used to search both protein and DNA databases.

[0118] The percentage similarity between two polypeptide sequences, e.g., sequence A and sequence B, is calculated by dividing the length of sequence A, minus the number of gap residues in sequence A, minus the number of gap residues in sequence B, into the sum of the residue matches between sequence A and sequence B, times one hundred. Gaps of low or of no similarity between the two amino acid sequences are not included in determining percentage similarity. Percent identity between polynucleotide sequences can also be counted or calculated by other methods known in the art, e.g., the Jotun Hein method (see, for example, Hein, 1990). Identity between sequences can also be determined by other methods known in the art, e.g., by varying hybridization conditions (see US Patent Application No. 20010010913).

[0119] Thus, the present disclosure provides methods for identifying a sequence similar or paralogous or orthologous or homologous to one or more polynucleotides as noted herein, or one or more target polypeptides encoded by the polynucleotides, or otherwise noted herein and may include linking or associating a given plant phenotype or gene function with a sequence. In the methods, a sequence database is provided (locally or across an internet or intranet) and a query is made against the sequence database using the relevant sequences herein and associated plant phenotypes or gene functions.

[0120] In addition, one or more polynucleotide sequences or one or more polypeptides encoded by the polynucleotide sequences may be used to search against a BLOCKS (Bairoch et al., 1997), PFAM, and other databases which contain previously identified and annotated motifs, sequences and gene functions. Methods that search for primary sequence patterns with secondary structure gap penalties (Smith et al., 1992) as well as algorithms such as Basic Local Alignment Search Tool (BLAST; Altschul, 1990; Altschul et al., 1993), BLOCKS (Henikoff and Henikoff, 1991), Hidden Markov Models (HMM; Eddy, 1996; Sonnhammer et al., 1997), and the like, can be used to manipulate and analyze polynucleotide and polypeptide sequences encoded by polynucleotides. These databases, algorithms and other methods are well known in the art and are described in Ausubel et al., 1997, and in Meyers, 1995.

[0121] A further method for identifying or confirming that specific homologous sequences control the same function is by comparison of the transcript profile(s) obtained upon overexpression or knockout of two or more related polypeptides. Since transcript profiles are diagnostic for specific cellular states, one skilled in the art will appreciate that genes that have a highly similar transcript profile (e.g., with greater than 50% regulated transcripts in common, or with greater than 70% regulated transcripts in common, or with greater than 90% regulated transcripts in common) will have highly similar functions. Fowler and Thomashow, 2002, have shown that three paralogous AP2 family genes (CBF1, CBF2 and CBF3) are induced upon cold treatment, and each of which can condition improved freezing tolerance, and all have highly similar transcript profiles. Once a polypeptide has been shown to provide a specific function, its transcript profile becomes a diagnostic tool to determine whether paralogs or orthologs have the same function.

[0122] Furthermore, methods using manual alignment of sequences similar or homologous to one or more polynucleotide sequences or one or more polypeptides encoded by the polynucleotide sequences may be used to identify regions of similarity and B-box zinc finger domains. Such manual methods are well-known of those of skill in the art and can include, for example, comparisons of tertiary structure between a polypeptide sequence encoded by a polynucleotide that comprises a known function and a polypeptide sequence encoded by a polynucleotide sequence that has a function not yet determined. Such examples of tertiary structure may comprise predicted alpha helices, beta-sheets, amphipathic helices, leucine zipper motifs, zinc finger motifs, proline-rich regions, cysteine repeat motifs, and the like.

[0123] Orthologs and paralogs of presently disclosed polypeptides may be cloned using compositions provided by the present disclosure according to methods well known in the art. cDNAs can be cloned using mRNA from a plant cell or tissue that expresses one of the present sequences. Appropriate mRNA sources may be identified by interrogating Northern blots with probes designed from the present sequences, after which a library is prepared from the mRNA obtained from a positive cell or tissue. Polypeptide-encoding cDNA is then isolated using, for example, PCR, using primers designed from a presently disclosed gene sequence, or by probing with a partial or complete cDNA or with one or more sets of degenerate probes based on the disclosed sequences. The cDNA library may be used to transform plant cells. Expression of the cDNAs of interest is detected using, for example, microarrays, Northern blots, quantitative PCR, or any other technique for monitoring changes in expression. Genomic clones may be isolated using similar techniques to those.

[0124] Examples of orthologs of the Arabidopsis polypeptide sequences and their functionally similar orthologs are listed in Tables 1 and 2 and in the Sequence Listing. In addition to the sequences in Table 1, Table 2, and the Sequence Listing, the present disclosure encompasses isolated nucleotide sequences that are phylogenetically and structurally similar to sequences listed in the Sequence Listing and can function in a plant by increasing yield and/or and abiotic stress tolerance when ectopically expressed in a plant.

[0125] Since a significant number of these sequences are phylogenetically and sequentially related to each other and have been shown to increase yield from a plant and/or abiotic stress tolerance, one skilled in the art would predict that other similar, phylogenetically related sequences falling within the present clades of polypeptides would also perform similar functions when ectopically expressed.

### Identifying Polynucleotides or Nucleic Acids by Hybridization

[0126] Polynucleotides homologous to the sequences illustrated in the Sequence Listing and tables can be identified, e.g., by hybridization to each other under stringent or under highly stringent conditions.

[0127] Polynucleotides that encode polypeptides that are closely-related, that is, orthologous or paralogous, to the disclosed polypeptide sequences may be identifiable by their ability to hybridize to the disclosed polynucleotides under high stringency conditions, including the high stringency conditions provided herein.

[0128] Single stranded polynucleotides hybridize when they associate based on a variety of well characterized physical-chemical forces, such as hydrogen bonding, solvent exclusion, base stacking and the like. The stringency of hybridization reflects the degree of sequence identity of the nucleic acids involved, such that the higher the stringency, the more similar are the two polynucleotide strands. Stringency is influenced by a variety of factors, including temperature, salt concentration and composition, organic and non-organic additives, solvents, etc. present in both the hybridization and wash solutions and incubations (and number thereof), as described in more detail in the references cited below (e.g., Sambrook et al., 1989; Berger and Kimmel, 1987; and Anderson and Young, 1985).

[0129] Encompassed by the present disclosure are polynucleotide sequences that are capable of hybridizing to the claimed polynucleotide sequences, including any of the polynucleotides within the Sequence Listing, and fragments thereof under various conditions of stringency (see, for example, Wahl and Berger, 1987; and Kimmel, 1987). In addition to the nucleotide sequences listed in the Sequence Listing, full length cDNA, orthologs, and paralogs of the present nucleotide sequences may be identified and isolated using well-known methods. The cDNA libraries, orthologs, and paralogs of the present nucleotide sequences may be screened using hybridization methods to determine their utility as hybridization target or amplification probes.

[0130] With regard to hybridization, conditions that are highly stringent, and means for achieving them, are well known in the art. See, for example, Sambrook et al., 1989; Berger, 1987, pages 467-469; and Anderson and Young, 1985).

[0131] Stability of DNA duplexes is affected by such factors as base composition, length, and degree of base pair mismatch. Hybridization conditions may be adjusted to allow DNAs of different sequence relatedness to hybridize. The melting temperature (Tₘ) is defined as the temperature when 50% of the duplex molecules have dissociated into their constituent single strands. The melting temperature of a perfectly matched duplex, where the hybridization buffer contains formamide as a denaturing agent, may be estimated by the following equations:

DNA-DNA: Tₘ(° C.)=81.5+16.6(log [Na+])+0.41(% G+C)−0.62(% formamide)−500/L (I)

DNA-RNA: Tₘ(° C.)=79.8+18.5(log [Na+])+0.58(% G+C)+0.12(% G+C)²−0.5(% formamide)−820/L (II)

RNA-RNA: Tₘ(° C.)=79.8+18.5(log [Na+])+0.58(% G+C)+0.12(% G+C)²−0.35(% formamide)−820/L (III)

[0132] where L is the length of the duplex formed, [Na+] is the molar concentration of the sodium ion in the hybridization or washing solution, and % G+C is the percentage of (guanine+cytosine) bases in the hybrid. For imperfectly matched hybrids, approximately 1° C. is required to reduce the melting temperature for each 1% mismatch.

[0133] Hybridization experiments are generally conducted in a buffer of pH between 6.8 to 7.4, although the rate of hybridization is nearly independent of pH at ionic strengths likely to be used in the hybridization buffer (Anderson and Young, 1985). In addition, one or more of the following may be used to reduce non-specific hybridization: sonicated salmon sperm DNA or another non-complementary DNA, bovine serum albumin, sodium pyrophosphate, sodium dodecylsulfate (SDS), polyvinyl-pyrrolidone, ficoll and Denhardt's solution. Dextran sulfate and polyethylene glycol 6000 act to exclude DNA from solution, thus raising the effective probe DNA concentration and the hybridization signal within a given unit of time. In some instances, conditions of even greater stringency may be desirable or required to reduce non-specific and/or background hybridization. These conditions may be created with the use of higher temperature, lower ionic strength and higher concentration of a denaturing agent such as formamide.

[0134] Stringency conditions can be adjusted to screen for moderately similar fragments such as homologous sequences from distantly related organisms, or to highly similar fragments such as genes that duplicate functional enzymes from closely related organisms. The stringency can be adjusted either during the hybridization step or in the post-hybridization washes. Salt concentration, formamide concentration, hybridization temperature and probe lengths are variables that can be used to alter stringency (as described by the formula above). As a general guidelines high stringency is typically performed at Tₘ−5° C. to Tₘ−20° C., moderate stringency at Tₘ−20° C. to Tₘ−35° C. and low stringency at Tₘ-35° C. to Tₘ−50° C. for duplex >150 base pairs. Hybridization may be performed at low to moderate stringency (25-50° C. below Tₘ), followed by post-hybridization washes at increasing stringencies. Maximum rates of hybridization in solution are determined empirically to occur at Tₘ−25° C. for DNA-DNA duplex and Tₘ−15° C. for RNA-DNA duplex. Optionally, the degree of dissociation may be assessed after each wash step to determine the need for subsequent, higher stringency wash steps.

[0135] High stringency conditions may be used to select for nucleic acid sequences with high degrees of identity to the disclosed sequences. An example of stringent hybridization conditions obtained in a filter-based method such as a Southern or Northern blot for hybridization of complementary nucleic acids that have more than 100 complementary residues is about 5° C. to 20° C. lower than the thermal melting point (Tₘ) for the specific sequence at a defined ionic strength and pH. Conditions used for hybridization may include about 0.02 M to about 0.15 M sodium chloride, about 0.5% to about 5% casein, about 0.02% SDS or about 0.1% N-laurylsarcosine, about 0.001 M to about 0.03 M sodium citrate, at hybridization temperatures between about 50° C. and about 70° C. More preferably, high stringency conditions are about 0.02 M sodium chloride, about 0.5% casein, about 0.02% SDS, about 0.001 M sodium citrate, at a temperature of about 50° C. Nucleic acid molecules that hybridize under stringent conditions will typically hybridize to a probe based on either the entire DNA molecule or selected portions, e.g., to a unique subsequence, of the DNA.

[0136] Stringent salt concentration will ordinarily be less than about 750 mM NaCl and 75 mM trisodium citrate. Increasingly stringent conditions may be obtained with less than about 500 mM NaCl and 50 mM trisodium citrate, to even greater stringency with less than about 250 mM NaCl and 25 mM trisodium citrate. Low stringency hybridization can be obtained in the absence of organic solvent, e.g., formamide, whereas high stringency hybridization may be obtained in the presence of at least about 35% formamide, and more preferably at least about 50% formamide. Stringent temperature conditions will ordinarily include temperatures of at least about 30° C., more preferably of at least about 37° C., and most preferably of at least about 42° C. with formamide present. Varying additional parameters, such as hybridization time, the concentration of detergent, e.g., sodium dodecyl sulfate (SDS) and ionic strength, are well known to those skilled in the art. Various levels of stringency are accomplished by combining these various conditions as needed.

[0137] The washing steps that follow hybridization may also vary in stringency; the post-hybridization wash steps primarily determine hybridization specificity, with the most critical factors being temperature and the ionic strength of the final wash solution. Wash stringency can be increased by decreasing salt concentration or by increasing temperature. Stringent salt concentration for the wash steps will preferably be less than about 30 mM NaCl and 3 mM trisodium citrate, and most preferably less than about 15 mM NaCl and 1.5 mM trisodium citrate.

[0138] Thus, hybridization and wash conditions that may be used to bind and remove polynucleotides with less than the desired homology to the nucleic acid sequences or their complements that encode the present polypeptides include, for example:

[0139] 6×SSC at 65° C.;

[0140] 50% formamide, 4×SSC at 42° C.; or

[0141] 0.5×SSC, 0.1% SDS at 65° C.;

[0142] with, for example, two wash steps of 10-30 minutes each. Useful variations on these conditions will be readily apparent to those skilled in the art.

[0143] A person of skill in the art would not expect substantial variation among polynucleotide species encompassed within the scope of the present disclosure because the highly stringent conditions set forth in the above formulae yield structurally similar polynucleotides.

[0144] If desired, one may employ wash steps of even greater stringency, including about 0.2×SSC, 0.1% SDS at 65° C. and washing twice, each wash step being about 30 minutes, or about 0.1×SSC, 0.1% SDS at 65° C. and washing twice for 30 minutes. The temperature for the wash solutions will ordinarily be at least about 25° C., and for greater stringency at least about 42° C. Hybridization stringency may be increased further by using the same conditions as in the hybridization steps, with the wash temperature raised about 3° C. to about 5° C., and stringency may be increased even further by using the same conditions except the wash temperature is raised about 6° C. to about 9° C. For identification of less closely related homologs, wash steps may be performed at a lower temperature, e.g., 50° C.

[0145] An example of a low stringency wash step employs a solution and conditions of at least 25° C. in 30 mM NaCl, 3 mM trisodium citrate, and 0.1% SDS over 30 minutes. Greater stringency may be obtained at 42° C. in 15 mM NaCl, with 1.5 mM trisodium citrate, and 0.1% SDS over 30 minutes. Even higher stringency wash conditions are obtained at 65° C.-68° C. in a solution of 15 mM NaCl, 1.5 mM trisodium citrate, and 0.1% SDS. Wash procedures will generally employ at least two final wash steps. Additional variations on these conditions will be readily apparent to those skilled in the art (see, for example, US Patent Application No. 20010010913).

[0146] Stringency conditions can be selected such that an oligonucleotide that is perfectly complementary to the coding oligonucleotide hybridizes to the coding oligonucleotide with at least about a 5-10× higher signal to noise ratio than the ratio for hybridization of the perfectly complementary oligonucleotide to a nucleic acid encoding a polypeptide known as of the filing date of the application. It may be desirable to select conditions for a particular assay such that a higher signal to noise ratio, that is, about 15× or more, is obtained. Accordingly, a subject nucleic acid will hybridize to a unique coding oligonucleotide with at least a 2× or greater signal to noise ratio as compared to hybridization of the coding oligonucleotide to a nucleic acid encoding known polypeptide. The particular signal will depend on the label used in the relevant assay, e.g., a fluorescent label, a colorimetric label, a radioactive label, or the like. Labeled hybridization or PCR probes for detecting related polynucleotide sequences may be produced by oligolabeling, nick translation, end-labeling, or PCR amplification using a labeled nucleotide.

[0147] Encompassed by the present disclosure are polynucleotide sequences that are capable of hybridizing to the claimed polynucleotide sequences, including any of the polynucleotides within the Sequence Listing, and fragments thereof under various conditions of stringency (see, for example, Wahl and Berger, 1987, pages 399-407; and Kimmel, 1987). In addition to the nucleotide sequences in the Sequence Listing, full length cDNA, orthologs, and paralogs of the present nucleotide sequences may be identified and isolated using well-known methods. The cDNA libraries, orthologs, and paralogs of the present nucleotide sequences may be screened using hybridization methods to determine their utility as hybridization target or amplification probes.

### Sequence Variations

[0148] It will readily be appreciated by those of skill in the art that the instant disclosure includes any of a variety of polynucleotide sequences provided in the Sequence Listing or capable of encoding polypeptides that function similarly to those provided in the Sequence Listing. Due to the degeneracy of the genetic code, many different polynucleotides can encode identical and/or substantially similar polypeptides in addition to those sequences illustrated in the Sequence Listing. Nucleic acids having a sequence that differs from the sequences shown in the Sequence Listing, or complementary sequences, that encode functionally equivalent peptides (that is, peptides having some degree of equivalent or similar biological activity) but differ in sequence from the sequence shown in the sequence listing due to degeneracy in the genetic code, are also within the scope of the instant disclosure and claims.

[0149] Altered polynucleotide sequences encoding polypeptides include those sequences with deletions, insertions, or substitutions of different nucleotides, resulting in a polynucleotide encoding a polypeptide with at least one functional characteristic of the instant polypeptides. Included within this definition are polymorphisms which may or may not be readily detectable using a particular oligonucleotide probe of the polynucleotide encoding the instant polypeptides, and improper or unexpected hybridization to allelic variants, with a locus other than the normal chromosomal locus for the polynucleotide sequence encoding the instant polypeptides.

[0150] Sequence alterations that do not change the amino acid sequence encoded by the polynucleotide are termed “silent” variations. With the exception of the codons ATG and TGG, encoding methionine and tryptophan, respectively, any of the possible codons for the same amino acid can be substituted by a variety of techniques, for example, site-directed mutagenesis, available in the art. Accordingly, any and all such variations of a sequence selected from the above tables are a feature of the disclosure.

[0151] In addition to silent variations, other conservative variations that alter one, or a few amino acids in the encoded polypeptide, can be made without altering the function of the polypeptide. For example, substitutions, deletions and insertions introduced into the sequences provided in the Sequence Listing are also envisioned. Such sequence modifications can be engineered into a sequence by site-directed mutagenesis (for example, Olson et al., Smith et al., Zhao et al., and other articles in Wu, 1993), or the other methods known in the art or noted herein Amino acid substitutions are typically of single residues; insertions usually will be on the order of about from 1 to 10 amino acid residues; and deletions will range about from 1 to 30 residues. In preferred embodiments, deletions or insertions are made in adjacent pairs, for example, a deletion of two residues or insertion of two residues. Substitutions, deletions, insertions or any combination thereof can be combined to arrive at a sequence. The mutations that are made in the polynucleotide encoding the transcriptional regulator should not place the sequence out of reading frame and should not create complementary regions that could produce secondary mRNA structure. Preferably, the polypeptide encoded by the DNA performs the desired function.

[0152] Conservative substitutions are those in which at least one residue in the amino acid sequence has been removed and a different residue inserted in its place. Such substitutions generally are made in accordance with the Table 3 when it is desired to maintain the activity of the protein. Table 3 shows amino acids which can be substituted for an amino acid in a protein and which are typically regarded as conservative substitutions.

TABLE 3
Possible conservative amino acid substitutions

| Amino Acid | Conservative |
|---|---|
| Residue | substitutions |
| Ala | Ser |
| Arg | Lys |
| Asn | Gln; His |
| Asp | Glu |
| Gln | Asn |
| Cys | Ser |
| Glu | Asp |
| Gly | Pro |
| His | Asn; Gln |
| Ile | Leu, Val |
| Leu | Ile; Val |
| Lys | Arg; Gln |
| Met | Leu; Ile |
| Phe | Met; Leu; Tyr |
| Ser | Thr; Gly |
| Thr | Ser; Val |
| Trp | Tyr |
| Tyr | Trp; Phe |
| Val | Ile; Leu |

[0153] The polypeptides provided in the Sequence Listing have a novel activity, such as, for example, regulatory activity. Although all conservative amino acid substitutions (for example, one basic amino acid substituted for another basic amino acid) in a polypeptide will not necessarily result in the polypeptide retaining its activity, it is expected that many of these conservative mutations would result in the polypeptide retaining its activity. Most mutations, conservative or non-conservative, made to a protein but outside of a conserved domain required for function and protein activity will not affect the activity of the protein to any great extent.

### Examples

[0154] It is to be understood that the present disclosure is not limited to the particular devices, machines, materials and methods described. Although particular embodiments are described, equivalent embodiments may be used to produce the instant compositions and practice the instant methods.

[0155] The disclosure, now being generally described, will be more readily understood by reference to the following examples, which are included merely for purposes of illustration of certain aspects and embodiments of the present disclosure and are not intended to limit claims to the instant compositions or methods. It will be recognized by one of skill in the art that a polypeptide that is associated with a particular first trait may also be associated with at least one other, unrelated and inherent second trait which was not predicted by the first trait.

### Example I

### Vector and Cloning Information for Arabidopsis

[0156] A number of constructs were used to modulate the activity of the disclosed sequences. An individual project was defined as the analysis of lines for a particular construct (for example, this might include any of the disclosed lines that constitutively overexpress a disclosed B-box polypeptide sequence). In the present study, a full-length wild-type version of a gene was directly fused to a promoter that drove its expression in transgenic plants. Such a promoter could be the native promoter of that gene, or the CaMV 35S promoter. Alternatively, a promoter that drives tissue specific or conditional expression could be used in similar studies.

[0157] In the present study, expression of a given polynucleotide from a particular promoter was achieved by either a direct-promoter fusion construct in which that sequence was cloned directly behind the promoter of interest, or by a two-component expression system. A direct fusion approach has the advantage of allowing for simple genetic analysis if a given promoter-polynucleotide line is to be crossed into different genetic backgrounds at a later date. The two-component method, on the other hand, potentially allows for greater versatility in the creation of various promoter-gene combinations, and has the potential for generating stronger expression to be obtained via an amplification of transcription.

[0158] A list of constructs (PIDs) used to transform plants, indicating the promoter fragment that was used to drive the transgene and the cloning vector backbone, is provided in Table 4. Compilations of the sequences of promoter fragments and the expressed transgene sequences within the PIDs are provided in the Sequence Listing. The list of constructs presented in Table 4 is not intended to limit the instant description; other constructs that may be used to transform plants, and which may comprise useful promoter-gene combinations that are active in various tissues or in response to various or particular environmental conditions may also be envisioned.

TABLE 4
Sequences of promoter fragments and the expressed transgene sequences

| | SEQ ID | Plant from | | | |
|---|---|---|---|---|---|
| | NO: of | which | | | |
| Gene | Gene | sequence | Construct | Promoter:: | Expression |
| Identifier | Identifier | derived | (PID) | Leader | construct(s) |
| AT4G27310; | 1 | Arabidopsis | pMON125158 | 35S::Hsp70L | Direct promoter- |
| or AtBBX28 | | | | | fusion |
| (G1481) | | | | | |
| AT2G31380; | 153 | Arabidopsis | pMON125664 | 35S::Hsp70L | Direct promoter- |
| or AtBBX25 | | | | | fusion |
| (G1894) | | | | | |
| AT1G06040 | 151 | Arabidopsis | pMON125195 | 35S::Hsp70L | Direct promoter- |
| or AtBBX24 | | | | | fusion |
| (G329) | | | | | |
| AT4G15248; | 39 | Arabidopsis | pMON125199 | 35S::Hsp70L | Direct promoter- |
| or AtBBX30 | | | | | fusion |
| (G1478) | | | | | |
| AT2G21320; | 201 | Arabidopsis | pMON125196 | 35S::Hsp70L | Direct promoter- |
| or AtBBX18 | | | | | fusion |
| (G1881) | | | | | |
| AT3G07650 | 103 | Arabidopsis | pMON125230 | 35S::Hsp70L | Direct promoter- |
| or AtBBX7 | | | | | fusion |
| (G2440) | | | | | |
| AT1G60250 | 51 | Arabidopsis | pMON125732 | 35S::Hsp70L | Direct promoter- |
| or AtBBX26 | | | | | fusion |
| (G1486) | | | | | |
| AT4G38960 | 199 | Arabidopsis | pMON125730 | 35S::Hsp70L | Direct promoter- |
| or AtBBX19 | | | | | fusion |
| (G902) | | | | | |
| AT4G39070 | 53 | Arabidopsis | pMON125197 | 35S::Hsp70L | Direct promoter- |
| or AtBBX20 | | | | | fusion |
| (G1888) | | | | | |

### Example II

### Transformation

[0159] Gruber et al., 1993, described several expression vectors and culture methods that may be used for cell or tissue transformation and subsequent regeneration.

### Dicot and Monocot Expression Vectors

[0160] Transformation of plants and plant parts by Agrobacterium-mediated transformation can be practiced using a recombinant DNA construct, vector or cassette with the genetic elements as shown in Table 5 for dicots and Table 6 for monocots. The disclosed recombinant polynucleotides in the Sequence Listing “MBI_{—}0120 PCT_ST25” may be incorporated in such recombinant DNA constructs. The elements in a recombinant DNA construct provided in Tables 5 and 6 are only examples of different elements that can be used for the purpose of producing transgenic plants that have incorporated the polynucleotides. Other elements can be used as well in combination with the polynucleotides of the present disclosure to achieve trait modification.

[0161] A base recombinant DNA construct specifically useful for inserting a recombinant expression cassette into a chromosome in a nucleus in a dicot plant by Agrobacterium-mediated transformation is provided in Table 5. In Table 5, column 1 describes the function of the segment of the vector, column 2 provides a short name of a discrete genetic element and column 3 provides a more detailed description of the element.

TABLE 5
Example of an expression vector useful for transformation of dicot plants and plant parts.

| Function | Name | Element Description |
|---|---|---|
| Agrobacterium T-DNA | B-AGRtu.left border | Agro left border sequence, essential for transfer of T- |
| transfer | | DNA. |
| Plant selectable marker | P-At.Act7 | Promoter from the Arabidopsis actin 7 gene |
| expression cassette | L-At.Act7 | 5′UTR of Arabidopsis Act7 gene |
| | I-At.Act7 | Intron from the Arabidopsis actin7 gene |
| | TS-At.ShkG-CTP2 | Transit peptide region of Arabidopsis EPSPS |
| | CR-AGRtu.aroA- | Codon modified CP4 coding region |
| | CP4.nno_At | |
| | T-AGRtu.nos | A 3′ non-translated region of the nopaline synthase |
| | | gene of Agrobacterium tumefaciens Ti plasmid which |
| | | functions to direct polyadenylation of the mRNA. |
| Gene of interest | P-CaMV.35S-enh | Promoter for 35S RNA from CaMV containing a |
| expression cassette | | duplication of the −90 to −350 region. |
| | GOI | A polynucleotide or polypeptide-coding sequence in |
| | | Tables 1 or 2 |
| | T-Gb.E6-3b | 3′ untranslated region from the fiber protein E6 gene of |
| | | sea-island cotton. |
| Agrobacterium T-DNA | B-AGRtu.right border | Agro right border sequence, essential for transfer of T- |
| transfer | | DNA. |
| Maintenance in E. coli | OR-Ec.oriV-RK2 | The vegetative origin of replication from plasmid RK2. |
| | CR-Ec.rop | Coding region for repressor of primer from the ColE1 |
| | | plasmid. Expression of this gene product interferes with |
| | | primer binding at the origin of replication, keeping |
| | | plasmid copy number low. |
| | OR-Ec.ori-ColE1 | The minimal origin of replication from the E. coli |
| | | plasmid ColE1. |
| | P-Ec.aadA-SPC/STR | Promoter for Tn7 adenylyltransferase (AAD (3″)) |
| | CR-Ec.aadA-SPC/STR | Coding region for Tn7 adenylyltransferase (AAD (3″)) |
| | | conferring spectinomycin and streptomycin resistance. |
| | T-Ec.aadA-SPC/STR | 3′ UTR from the Tn7 adenylyltransferase (AAD (3″)) |
| | | gene of E. coli. |

[0162] An example of an expression vector that may be used to transform a monocot plant by Agrobacterium-mediated transformation is provided in Table 6. In Table 6, column 1 describes the function of the segment of the vector, column 2 provides a short name of the discrete genetic elements and column 3 provides a more detailed description of the elements.

TABLE 6
Example of an expression vector useful for transformation of monocot plants and plant parts.

| Function | Name | Element Description |
|---|---|---|
| Agrobacterium T- | B-AGRtu.right border | Agrobacterium right border sequence essential for |
| DNA transfer | | transfer of T-DNA. |
| Gene of interest | E-Os.Act1 | Upstream promoter region of the rice actin 1 gene |
| expression cassette | E-CaMV.35S.2xA1-B3 | Duplicated35S A1-B3 domain without TATA box |
| | P-Os.Act1 | Promoter region of the rice actin 1 gene |
| | L-Ta.Lhcb1 | 5′ untranslated leader of wheat major chlorophyll a/b |
| | | binding protein |
| | I-Os.Act1 | First intron and flanking UTR exon sequences from the |
| | | rice actin 1 gene |
| | GOI | A polynucleotide or polypeptide-coding sequence in |
| | | Table 1 and Table 2 |
| | T-St.Pis4 | 3′ non-translated region of the potato proteinase |
| | | inhibitor II gene which functions to direct |
| | | polyadenylation of the mRNA |
| Plant selectable | P-Os.Act1 | Promoter from the rice actin 1 gene |
| marker expression | L-Os.Act1 | First exon of the rice actin 1 gene |
| cassette | I-Os.Act1 | First intron and flanking UTR exon sequences from the |
| | | rice actin 1 gene |
| | TS-At.ShkG-CTP2 | Transit peptide region of Arabidopsis EPSPS |
| | CR-AGRtu.aroA-CP4.nat | Coding region for bacterial strain CP4 native aroA |
| | | gene. |
| | T-AGRtu.nos | A 3′ non-translated region of the nopaline synthase |
| | | gene of Agrobacterium tumefaciens Ti plasmid which |
| | | functions to direct polyadenylation of the mRNA. |
| Agrobacterium T- | B-AGRtu.left border | Agro left border sequence, essential for transfer of T- |
| DNA transfer | | DNA. |
| Maintenance in E. coli | OR-Ec.oriV-RK2 | The vegetative origin of replication from plasmid RK2. |
| | CR-Ec.rop | Coding region for repressor of primer from the ColE1 |
| | | plasmid. Expression of this gene product interferes |
| | | with primer binding at the origin of replication, |
| | | keeping plasmid copy number low. |
| | OR-Ec.ori-ColE1 | The minimal origin of replication from the E. coli |
| | | plasmid ColE1. |
| | P-Ec.aadA-SPC/STR | Promoter for Tn7 adenylyltransferase (AAD (3″)) |
| | CR-Ec.aadA-SPC/STR | Coding region for Tn7 adenylyltransferase (AAD (3″)) |
| | | conferring spectinomycin and streptomycin resistance. |
| | T-Ec.aadA-SPC/STR | 3′ UTR from the Tn7 adenylyltransferase (AAD (3″)) |
| | | gene of E. coli. |

[0163] To construct expression vectors for expressing a protein identified in Table 1 and Table 2, primers for PCR amplification of the protein coding nucleotides are designed at or near the start and stop codons of the coding sequence, in order to eliminate most of the 5′ and 3′ untranslated regions. The protein coding nucleotides are inserted into the base vector in the gene of interest expression cassette at an insertion site, i.e. between the intron element and the polyadenylation element (Table 5 or Table 6, depending on whether the plant to be transformed is a dicot or monocot, respectively).

[0164] To construct expression vectors for suppressing a protein identified in Tables 1 and 2, the amplified protein coding nucleotides may be assembled in a sense and antisense arrangement and inserted into the base expression vector at the insertion site in the gene of interest expression cassette (Table 5 or Table 6, depending on whether the plant to be transformed is a dicot or monocot, respectively) to provide transcribed RNA that will form a double-stranded RNA for RNA interference suppression of the protein. Expression vectors for suppressing a protein identified in Tables 1 and 2 may also be designed to insert an expression cassette that expresses (a) a miRNA that targets the gene for suppression, (b) a messenger RNA that is translated to the target protein and has a synthetic miRNA recognition site that would result in down-modulation of the target protein, (c) an RNA that forms a dsRNA and that is processed into siRNAs that effect down regulation of the target protein, (d) a ssRNA that forms a ta-siRNA which results in the production of siRNAs that effect down-modulation of the target protein.

Transformation of Dicots or Eudicots to Produce Increased Yield and/or Abiotic Stress Tolerance

[0165] Crop species that overexpress or suppress the disclosed and closely related polypeptides may produce plants with increased water deprivation or drought tolerance, cold and/or nutrient tolerance and/or yield in both stressed and non-stressed conditions. Thus, polynucleotide sequences listed in the Sequence Listing recombined into, for example, one of the disclosed expression vector, or another suitable expression vector such as one comprising a sequence that is closely related to the instantly disclosed sequences, may be transformed into a plant for the purpose of modifying plant traits such as improved yield and/or quality. The expression vector may contain a constitutive promoter, an inducible promoter, a diurnally-regulated promoter, a tissue-enhanced promoter, a tissue-preferred promoter, or a tissue-specific promoter operably linked to the polynucleotide.

[0166] The expression vector may be introduced into a variety of plants by means well known in the art such as, for example, direct DNA transfer or Agrobacterium tumefaciens-mediated transformation. It is now a routine to produce transgenic plants from most dicot plants (see Weissbach and Weissbach, 1989; Gelvin et al., 1990; Herrera-Estrella et al., 1983; Bevan, 1984; and Klee, 1985). Methods for analysis of traits are routine in the art and examples are disclosed above. There are a substantial number of alternatives to Agrobacterium-mediated transformation protocols. One such method is microprojectile-mediated transformation, in which DNA on the surface of microprojectile particles is driven into plant tissues with a biolistic device (see, for example, Sanford et al., 1987; Christou et al., 1992; Sanford, 1993; Klein et al., 1987; U.S. Pat. No. 5,015,580 (Christou et al, issued May 14, 1991); and U.S. Pat. No. 5,322,783 (Tomes et al., issued Jun. 21, 1994)). Alternatively, sonication methods (see, for example, Zhang et al., 1991); direct uptake of DNA into protoplasts using CaCl₂ precipitation, polyvinyl alcohol or poly-L-ornithine (see, for example, Hain et al., 1985; Draper et al., 1982); liposome or spheroplast fusion (see, for example, Deshayes et al., 1985; Christou et al., 1987); and electroporation of protoplasts and whole cells and tissues (see, for example, Donn et al., 1990; D'Halluin et al., 1992; and Spencer et al., 1994) have been used to introduce foreign DNA and expression vectors into plants.

### Transformation of Arabidopsis

[0167] Transformation of Arabidopsis was performed by an Agrobacterium-mediated protocol based on the method of Bechtold and Pelletier, 1998. Unless otherwise specified, all experimental work was done using the Columbia ecotype.

[0168] Plant Preparation.

[0169] Arabidopsis seeds were sown on mesh covered pots. The seedlings were thinned so that 6-10 evenly spaced plants remained on each pot 10 days after planting. The primary bolts were cut off a week before transformation to break apical dominance and encourage auxiliary shoots to form. Transformation was typically performed at 4-5 weeks after sowing.

[0170] Bacterial Culture Preparation.

[0171] Agrobacterium stocks were inoculated from single colony plates or from glycerol stocks and grown with the appropriate antibiotics until saturation. On the morning of transformation, the saturated cultures were centrifuged and bacterial pellets were re-suspended in Infiltration Media (0.5×MS, 1×B5 Vitamins, 5% sucrose, 1 mg/ml benzylaminopurine riboside, 200 μl/L Silwet L77) until an A600 reading of 0.8 was reached. Transformation and Seed Harvest.

[0172] The Agrobacterium solution was poured into dipping containers. All flower buds and rosette leaves of the plants were immersed in this solution for 30 seconds. The plants were laid on their side and wrapped to keep the humidity high. The plants were kept this way overnight at 4° C. and then the pots were turned upright, unwrapped, and moved to the growth racks.

[0173] The plants were maintained on the growth rack under 24-hour light until seeds were ready to be harvested. Seeds were harvested when 80% of the siliques of the transformed plants were ripe (approximately 5 weeks after the initial transformation). This seed was deemed T0 seed, since it was obtained from the T0 generation, and was later plated on selection plates (with either kanamycin or sulfonamide, see Example VI). Resistant plants that were identified on such selection plates comprised the T1 generation.

[0174] Several independently transformed lines with each gene were grown on MS-agar plates without sucrose. After stratification, a 3 h white light treatment was used to synchronize germination, followed by 21 h of dark treatment, before transferring the plates to continuous red light (30-40 μmoles/m²/s). Hypocotyl lengths were measured from digital images of 20-30 seedlings per line and compared to appropriate controls. Mean values of hypocotyl length were plotted with standard errors to determine whether increased expression of each of the B-box genes resulted in elongated hypocotyls, suggesting a negative role in light signaling.

### Transformation of Tomato Plants

[0175] Transformation of tomato plants may be conducted using the protocols of Koornneef et al, 1986, and in U.S. Pat. No. 6,613,962. The latter method is described briefly here. Eight day old cotyledon explants are precultured for 24 hours in Petri dishes containing a feeder layer of Petunia hybrida suspension cells plated on MS medium with 2% (w/v) sucrose and 0.8% agar supplemented with 10 μM α-naphthalene acetic acid and 4.4 μM 6-benzylaminopurine. The explants are then infected with a diluted overnight culture of Agrobacterium tumefaciens containing an expression vector comprising a disclosed or orthologous or paralogous polynucleotide for 5-10 minutes, blotted dry on sterile filter paper and cocultured for 48 hours on the original feeder layer plates. Overnight cultures of Agrobacterium tumefaciens are diluted in liquid MS medium with 2% (w/v/) sucrose, pH 5.7) to an OD₆₀₀ of 0.8.

[0176] Following cocultivation, the cotyledon explants are transferred to Petri dishes with selective medium comprising MS medium with 4.56 μM zeatin, 67.3 μM vancomycin, 418.9 μM cefotaxime and 171.6 μM kanamycin sulfate, and cultured under the culture conditions described above. The explants are subcultured every three weeks onto fresh medium. Emerging shoots are dissected from the underlying callus and transferred to glass jars with selective medium without zeatin to form roots. The formation of roots in a kanamycin sulfate-containing medium is a positive indication of a successful transformation.

### Transformation of Soybean Plants

[0177] Transformation of soybean plants may be conducted using the methods found in, for example, Miki et al., 1993, and U.S. Pat. Nos. 5,914,451, 5,824,877 and 6,384,301.

[0178] For Agrobacterium mediated transformation, soybean seeds are imbibed overnight and the meristem explants excised. Soybean explants are mixed with induced Agrobacterium cells from a strain containing plasmid DNA with the gene of interest cassette and a plant selectable marker cassette no later than 14 hours from the time of initiation of seed imbibition, and wounded using sonication. Following wounding, explants are placed in co-culture for 2-5 days at which point they are transferred to selection media for 6-8 weeks to allow selection and growth of transgenic shoots. Resistant shoots are harvested approximately 6-8 weeks and placed into selective rooting media for 2-3 weeks. Shoots producing roots are transferred to the greenhouse and potted in soil. Shoots that remain healthy on selection, but do not produce roots are transferred to non-selective rooting media for an additional two weeks. Roots from any shoots that produce roots off selection are tested for expression of the plant selectable marker before they are transferred to the greenhouse and potted in soil.

### Transformation of Cotton Plants

[0179] Transformation of cotton plants may be performed as generally described in WO0036911, U.S. Pat. Nos. 5,846,797, 7,790,460 and 7,947,869.

### Transformation of Canola Plants

[0180] Transformation of rapeseed/canola plants may be performed as described in U.S. Patent Publication No. 2010/0218271. Alternatively, transformation of cotyledonary petioles and hypocotyls of 5-6 day old young canola seedlings are used as explants for tissue culture and transformed according to Babic et al., 1998.

[0181] Tissues from in vitro grown canola seedlings are prepared and inoculated with overnight-grown Agrobacterium cells containing plasmid DNA with the gene of interest cassette and a plant selectable marker cassette. Following co-cultivation with Agrobacterium, the infected tissues are allowed to grow on selection to promote growth of transgenic shoots, followed by growth of roots from the transgenic shoots. The selected plantlets are then transferred to the greenhouse and potted in soil. Molecular characterizations are performed to confirm the presence of the gene of interest, and its expression in transgenic plants and progenies. Progeny transgenic plants are selected from a population of transgenic canola events under specified growing conditions and are compared with control canola plants. Control canola plants are substantially the same canola genotype but without the recombinant DNA, for example, either a parental canola plant of the same genotype that is not transformed with the identical recombinant DNA or a negative isoline of the transformed plant.

### Obtaining and Screening Events

[0182] The above process is repeated to produce multiple events of transgenic soybean, cotton and canola plant cells that are transformed with recombinant DNA of the present disclosure. Progeny transgenic plants and seed of the transformed plant cells are screened for decreased sensitivity to light, increased yield, greater height, greater stem diameter, greater resistance to lodging, increased secondary rooting, greater cold tolerance, greater tolerance to water deprivation or drought, reduced stomatal conductance, altered C/N sensing, increased tolerance to nitrogen limited conditions, greater late season growth and vigor, greater number of primary nodes, greater late season canopy coverage, increased tolerance to hyperosmotic stress, altered levels of ureides, altered levels of hexose sugars, altered SPS activity, altered levels starch, and delayed senescence.

[0183] After a plant or plant cell is transformed (and the latter regenerated into a plant), the transformed plant may be crossed with itself or a plant from the same line, a non-transformed or wild-type plant, or another transformed plant from a different transgenic line of plants. Crossing provides the advantages of producing new and often stable transgenic varieties. Genes and their conferred traits may be moved into distinct lines of plants using traditional backcrossing techniques well known in the art.

### Transformation of Monocots to Produce Increased Yield or Abiotic Stress Tolerance

[0184] Cereal plants such as, but not limited to, corn, wheat, rice, sorghum, sugarcane, or barley, may be transformed with the present polynucleotide sequences, including monocot or dicot-derived sequences such as those presented in the present Tables, cloned into an expression vector such as the one described in Table 6 or pGA643 containing a kanamycin-resistance marker or a herbicide-tolerance marker such as a glyphosate-tolerance marker, and expressed constitutively under, for example, the CaMV 35S or COR15 promoters, or with tissue-specific, tissue-enhanced, tissue preferred, diurnally-regulated or inducible promoters. The expression vectors may be one found in the Sequence Listing (for example, pMEN65, SEQ ID NO: 428), or any other suitable expression vector may be similarly used.

[0185] The expression vector may be introduced into a variety of cereal plants by means well known in the art including direct DNA transfer or Agrobacterium tumefaciens-mediated transformation. The latter approach may be accomplished by a variety of means, including, for example, that of U.S. Pat. No. 5,591,616, in which monocotyledon callus is transformed by contacting the dedifferentiating tissue with the Agrobacterium containing the expression vector.

[0186] The sample tissues are immersed in a suspension of 3×10⁻⁹ cells of Agrobacterium containing the expression vector for 3-10 minutes. The callus material is cultured on solid medium at 25° C. in the dark for several days. The calli grown on this medium are transferred to fresh Regeneration medium at 2-3 week intervals (2 or 3 times) until shoots develop. Shoots are then transferred to Shoot-Elongation medium every 2-3 weeks. Healthy-looking shoots are transferred to rooting medium and after roots have developed, the plants are placed into moist potting soil.

[0187] For Agrobacterium-mediated transformation of corn embryo cells, corn plants of a readily transformable line are grown in the greenhouse and ears are harvested when the embryos are 1.5 to 2.0 mm in length. Ears are surface sterilized by spraying or soaking the ears in 80% ethanol, followed by air drying. Immature embryos are isolated from individual kernels on surface sterilized ears. Prior to inoculation of maize cells, Agrobacterium cells are grown overnight at room temperature. Immature maize embryo cells are inoculated with Agrobacterium shortly after excision, and incubated at room temperature with Agrobacterium for 5-20 minutes. Immature embryo plant cells are then co-cultured with Agrobacterium for 1 to 3 days at 23° C. in the dark. Co-cultured embryos are transferred to selection media and cultured for approximately two weeks to allow embryogenic callus to develop. Embryogenic callus is transferred to culture medium containing a selective agent and subcultured at about two week intervals. Transformed plant cells are recovered 6 to 8 weeks after initiation of selection.

[0188] To regenerate transgenic corn plants a callus of transgenic plant cells resulting from transformation and selection is placed on media to initiate shoot development into plantlets which are transferred to potting soil for initial growth in a growth chamber at 26° C. followed by a mist bench before transplanting to 5 inch pots where plants are grown to maturity. The regenerated plants are self-fertilized and seed is harvested for use in one or more methods to select seeds, seedlings or progeny second generation transgenic plants (R2 plants) or hybrids, e.g. by selecting transgenic plants exhibiting an enhanced trait as compared to a control plant.

[0189] The transformed plants are analyzed for the presence of the NPTII or other marker protein by ELISA, using the ELISA NPTII kit from 5Prime-3Prime Inc. (Boulder, Colo.), or for the presence of the transgene by PCR.

[0190] Examples of wheat transformation are illustrated in U.S. Pat. No. 6,153,812 (microprojectile bombardment method) and U.S. Pat. No. 7,026,528 (Agrobacterium-mediated method).

[0191] It is also routine to use other methods to produce transgenic plants of most cereal crops (Vasil, 1994) such as corn, wheat, rice, sorghum (Cassas et al., 1993), and barley (Wan and Lemeaux, 1994). DNA transfer methods such as the microprojectile method can be used for corn (Fromm et al., 1990; Gordon-Kamm et al., 1990; Ishida, 1990), wheat (Vasil et al., 1992; Vasil et al., 1993; Weeks et al., 1993), and rice (Christou, 1991; Hiei et al., 1994; Aldemita and Hodges, 1996; and Hiei et al., 1997). For most cereal plants, embryogenic cells derived from immature scutellum tissues are the preferred cellular targets for transformation (Hiei et al., 1997; Vasil, 1994). After microprojectile bombardment the tissues are selected on selection medium to identify the transgenic embryogenic cells (Gordon-Kamm et al., 1990). Transgenic plants are regenerated by standard corn regeneration techniques (Fromm et al., 1990; Gordon-Kamm et al., 1990).

### Example III

### Stacking of the Disclosed Polynucleotides with Other Sequences of Interest, Including Other Disclosed Polynucleotides

[0192] It is envisioned that one or more of the polynucleotides in the instant sequence listing can be introduced into a plant in combination with other disclosed polynucleotide sequences, or with other polynucleotide sequences of interest (that is, the polynucleotides may be “stacked” within the plant) for the purpose of producing plants with enhanced or multiple useful traits. A single plant may thus comprise and ectopically express, overexpress, or suppress one or more of the disclosed polynucleotide sequences and/or their encoded polypeptides. For example, since it was shown that AtBBX32 was physically associated with GmBBX62 in vivo (Example V), introduction and co-expression of both AtBBX32 and GmBBX62 in a transgenic plant may provide the transgenic plant with enhanced traits. Therefore, stacking of the disclosed polynucleotide sequences may be used to create one or more transgenic plants with at least one useful trait, said traits including, for example (but not limited to), decreased sensitivity to light, increased yield, greater height, greater stem diameter, greater resistance to lodging, increased secondary rooting, greater cold tolerance, greater tolerance to water deprivation or drought, reduced stomatal conductance, altered C/N sensing, increased tolerance to nitrogen limiting conditions, improved late season growth and vigor, greater number of nodes, greater late season canopy coverage, increased tolerance to hyperosmotic stress, altered levels of ureides, altered levels of hexose sugars, altered SPS activity, altered levels of starch, and delayed senescence, as compared to a control plant that does not ectopically express or overexpress the disclosed polynucleotide sequences.

[0193] The combinations of polynucleotides introduced into target plants may also include multiple copies of any one of the disclosed polynucleotides. The disclosed polynucleotides may also be stacked with any other polynucleotide or combination of polynucleotide to produce transgenic plants with one or more useful trait combinations, including, for example (but not limited to), one or more of the traits listed in the previous paragraph, and possibly herbicide resistance (e.g., glyphosate resistance), disease resistance or tolerance, increased tolerance to heat, increased tolerance to oxidative stress, increased oil content, male sterility, lodging resistance, early flowering and/or development, delayed flowering and/or development, extended flowering and/or development time, traits desirable for chemical processing, and/or improved digestibility.

[0194] The combinations of polynucleotides within an individual plant can be introduced through a variety of means. This may include, for example, transforming a target plant with two or more nucleic acid sequences of interest at the same time or at different times, or introducing the two or more nucleic acid sequences of interest by different means such as a combination of transformation and breeding, where the nucleic acid sequences may be integrated into one or more loci. The two sequence cassettes can be contained in separate expression vectors (trans), where one of the expression vectors comprises a trans-acting element. A trans-acting element is a DNA sequence that controls transcriptional activity of a target gene through a diffusible gene product such as a protein, microRNA, or other diffusible repressor or activator. The regulated target gene may include a polynucleotide of the instant Sequence Listing. Alternatively, the two sequence cassettes can be contained in the same expression vector (cis). Introducing the sequences at the same time into a plant may be referred to as co-transformation, simultaneous transformation, or parallel transformation. Combinations of recombinant polynucleotides can also be introduced into a plant through subsequent, serial or super-transformation or re-transformation, that is, by providing a transgenic plant previously transformed with one polynucleotide of interest, and transforming the same plant with one or more distinct recombinant polynucleotides. In this method, a transgenic plant exhibiting one or more desired traits can be used as a target plant to introduce additional traits by super-transformation.

[0195] Thus, if the polynucleotide sequences (including one or more of the disclosed polynucleotide sequences) are introduced into plants by genetic transformation, the polynucleotide sequences can be transformed into the plant at any time and in any order.

[0196] Another method of stacking genes in a plant combines transformation with breeding methods. A plant that has been transformed with at least one polynucleotide sequence of interest (including one or more of the disclosed polynucleotide sequences) may be cross-bred with a transgenic or non-transformed plant in order to stack more than one gene in the plant.

[0197] Expression of the polynucleotide sequences can be regulated by the same promoter or by different promoters.

[0198] It may also be desirable to introduce an expression vector or cassette that will suppress the expression of a polynucleotide of interest. This may be combined with any combination of other suppression vectors or cassettes or overexpression vectors or cassettes to generate a desirable combination of traits in the plant, including traits disclosed in this Example.

### Example IV

### Expression and Analysis of Increased Yield and/or Abiotic Stress Tolerance in Non-Arabidopsis Species or Crop Plants

[0199] It has been shown that overexpression of a B-box polypeptide, BBX32 (At.BBX32; SEQ ID NO: 430), decreases light sensitivity of plants when the polypeptide is overexpressed in the plants, including in plants other than Arabidopsis (e.g., crop plants). BBX32 has been shown to improve crop performance and acts to repress the transcriptional activity of another B-box protein, AtBBX21 (G1482, SEQ ID NO: 56) on its native target promoter (prCHS) sequences (unpublished data). The instantly disclosed results provide evidence that HA:AtBBX28 (G1481) inhibited the transcriptional activity of HA:AtBBX21 to levels similar to the repression by HA:BBX32 (FIG. 2), suggesting that AtBBX28 is able to act as a repressor like BBX32. AtBBX28 may have common targets with BBX32 (FIG. 2) or it may act on specific targets independently of BBX32.

[0200] In fact, a number of the disclosed polypeptide sequences, including those found in the Sequence Listing, including SEQ ID NO: 2, 4, 6, 8, 10, 12, 14, 16, 18, 20, 22, 24, 26, 28, 30, 32, 34, 36, 38, 40, 42, 44, 46, 48, 50, 52, 54, 56, 58, 60, 62, 64, 66, 68, 70, 72, 74, 76, 78, 80, 82, 84, 86, 88, 90, 92, 94, 96, 98, 100, 102, 104, 106, 108, 110, 112, 114, 116, 118, 120, 122, 124, 126, 128, 130, 132, 134, 136, 138, 140, 142, 144, 146, 148, 150, 152, 154, 156, 158, 160, 162, 164, 166, 168, 170, 172, 174, 176, 178, 180, 182, 184, 186, 188, 190, 192, 194, 196, 198, 200, 202, 204, 206, 208, 210, 212, 214, 216, 218, 220, 222, 224, 226, 228, 230, 232, 234, 436, 438, 440, 442, 444, 446, 448, 450, 452, 454, 456, 458, 460, 462, 464, 466, 468, 470, 472, 474, 476, 478, 480, 482, 484, 486, 488, 490, 492, 494, 496, 498, 500, 502, 504, 506, 508, 510, 512, 514, 516, 518, 520, 522, 524, 526, 528, 530, 532, 534, 536, 538, 540, 542, 544, 546, 548 or 550 or orthologous sequences (as defined or claimed herein) that function in the same manner, may alter light sensitivity of plants when the sequences are overexpressed in the plants. It is expected that structurally similar orthologs and paralogs of the disclosed polypeptide sequences, which may be derived from diverse plant species, will also alter light sensitivity of plants when these orthologous and paralogous sequences are overexpressed. Furthermore, it is expected that the disclosed B-box polypeptide sequences, and structurally similar orthologs and paralogs of the disclosed B-box polypeptide sequences, can, at least in part and as a result of their altering light sensitivity, confer increased yield or increased tolerance to a number of abiotic stresses, including water deprivation or drought, cold, and nitrogen-limiting conditions, altered levels of ureides, altered levels of hexose sugars, altered SPS activity, altered levels of starch, and delayed senescence, relative to control plants, and thus may increase yield of crop or other commercially important plant species.

[0201] Relationships between the disclosed sequences in the present disclosure may be recognized by comparing structural similarity, for example, determined by a disclosed percentage identity to full length protein or their conserved domains, or by hybridization to a disclosed polynucleotide sequence.

[0202] Northern blot analysis, RT-PCR or microarray analysis of the regenerated, transformed plants may be used to show expression of a polypeptide of the present disclosure, or related orthologous or paralogous sequences that are capable of inducing increased yield or increased tolerance to abiotic stresses, including water deprivation, cold, and low nitrogen conditions.

[0203] After a eudicot plant, dicot plant, monocot plant or plant cell has been transformed (and the latter regenerated into a plant) and shown to have increased tolerance to abiotic stresses, including water deprivation or drought, cold, and nitrogen-limiting conditions, that is, able to tolerate greater planting density with a coincident increase in yield, or tolerance to abiotic stress, or produce greater yield relative to a control plant in the absence of stress conditions or under stress conditions, the transformed plant may be crossed with itself or a plant from the same line, a non-transformed or wild-type plant, or another transformed plant from a different transgenic line of plants.

[0204] The functions of specific polypeptides, including closely-related orthologs, may be analyzed and may be further characterized and incorporated into crop plants. The ectopic overexpression of these sequences may be regulated using constitutive, inducible, or tissue specific regulatory elements. Genes that have been examined and have been shown to modify plant traits (including altered light sensitivity with predicted increased yield and/or abiotic stress tolerance) encode polypeptides found in the Sequence Listing. In addition to these sequences, it is expected that newly discovered polynucleotide and polypeptide sequences closely related to polynucleotide and polypeptide sequences found in the Sequence Listing can also confer alteration of traits in a similar manner to the sequences found in the Sequence Listing, when transformed into any of a considerable variety of plants of different species, and including dicots and monocots. The polynucleotide and polypeptide sequences derived from monocots (e.g., the rice sequences) may be used to transform both monocot and dicot plants, and those derived from dicots (e.g., the Arabidopsis and soy genes) may be used to transform either group, although it is expected that some of these sequences will function best if the gene is transformed into a plant from the same group from which the sequence is derived.

[0205] As an example of a first step to determine water deprivation-related tolerance, seeds of these transgenic plants may be subjected to germination assays to measure sucrose sensing, severe desiccation or drought. Methods that may be used to measure relative sucrose sensing, severe desiccation tolerance or drought tolerance in genetically altered (for example, over-expressing) and control plants are as follows.

[0206] For sucrose sensing, germination assays may be conducted in growth media containing 9.4% sucrose with Arabidopsis overexpressors of BBX32 and closely-related sequences. Growing the plants under controlled temperature and humidity on sterile medium produces uniform plant material that has not been exposed to additional stresses (such as water stress) which could cause variability in the results obtained. Where possible, assay conditions are originally tested in a blind experiment with controls that have phenotypes related to the condition tested.

[0207] Prior to plating, seed for all experiments are surface sterilized in the following manner: (1) 5 minute incubation with mixing in 70% ethanol, (2) 20 minute incubation with mixing in 30% bleach, 0.01% triton-X 100, (3) 5× rinses with sterile water, (4) Seeds are re-suspended in 0.1% sterile agarose and stratified at 4° C. for 3-4 days. Germination assays follow modifications of the same basic protocol. Sterile seeds are sown on the conditional media that has a basal composition of 80% MS+ Vitamins. Plates are incubated at 22° C. under 24-hour light (120-130 μE m⁻² s⁻¹) in a growth chamber. Evaluation of germination and seedling vigor is performed five days after planting.

[0208] For severe desiccation (plate-based water deprivation) assays, seedlings are grown for 14 days on MS+ Vitamins+1% Sucrose at 22° C. Plates are opened in a sterile hood for 3 hr for hardening and then seedlings are removed from the media and dried for two hours in the sterile hood. After this time the plants are transferred back to plates and incubated at 22° C. for recovery. The plants are then evaluated after five days.

[0209] The soil drought assay (performed in clay pots) is based on that described by Haake et al., 2002.

[0210] Previously, we have performed clay-pot assays on segregating T2 populations, sown directly to soil. However, in the current procedure, seedlings are first germinated on selection plates containing either kanamycin or sulfonamide.

[0211] Seeds are sterilized by a 2 minute ethanol treatment followed by 20 minutes in 30% bleach/0.01% Tween and five washes in distilled water. Seeds were sown to MS agar in 0.1% agarose and stratified for three days at 4° C., before transfer to growth cabinets with a temperature of 22° C. After seven days of growth on selection plates, seedlings are transplanted to 3.5 inch diameter clay pots containing 80 g of a 50:50 mix of vermiculite:perlite topped with 80 g of ProMix. Typically, each pot contains 14 seedlings, and plants of the transgenic line being tested are in separate pots to the wild-type controls. Pots containing the transgenic line versus control pots are interspersed in the growth room, maintained under 24-hour light conditions (18-23° C., and 90-100 μE m⁻² s⁻¹) and watered for a period of 14 days. Water is then withheld and pots are placed on absorbent paper for a period of 8-10 days in to apply a drought treatment. After this period, a visual qualitative “drought score” from 0-6 is assigned to record the extent of visible drought stress symptoms. A score of “6” corresponds to no visible symptoms whereas a score of “0” corresponds to extreme wilting and the leaves having a “crispy” texture. At the end of the drought period, pots are re-watered and scored after 5-6 days; the number of surviving plants in each pot is counted, and the proportion of the total plants in the pot that survived is calculated.

[0212] In a given experiment, six or more pots of a transgenic line are compared with six or more pots of the appropriate control. The mean drought score and mean proportion of plants surviving (survival rate) are calculated for both the transgenic line and the wild-type pots. In each case a p-value* is calculated, which indicates the significance of the difference between the two mean values. The results for each transgenic line across each planting for a particular project are then presented in a results table.

[0213] Calculation of p-Values

[0214] For the assays where control and experimental plants were in separate pots, survival is analyzed with a logistic regression to account for the fact that the random variable is a proportion between 0 and 1. The reported p-value is the significance of the experimental proportion contrasted to the control, based upon regressing the logit-transformed data.

[0215] Drought score, being an ordered factor with no real numeric meaning, is analyzed with a non-parametric test between the experimental and control groups. The p-value is calculated with a Mann-Whitney rank-sum test.

[0216] Plants overexpressing the disclosed, orthologous or paralogous sequences may be found to be more tolerant to high sucrose by having better germination, longer radicals, and more cotyledon expansion.

[0217] Disclosed or orthologous or paralogous sequences, or other sequences closely related to the disclosed B-box polynucleotides and B-box polypeptides, may also be used to generate transgenic plants that are more tolerant to nitrogen-limiting conditions or cold than control plants.

[0218] All of these abiotic stress tolerances conferred by disclosed B-box polynucleotides and B-box polypeptides may contribute to increased yield of commercially available plants. BBX32 overexpressors have been shown to increase yield of plants in the apparent absence of significantly obvious abiotic stress, as evidenced by including increased height, increased early season vigor and estimated stand count, and increased late season canopy coverage observed in soy plants overexpressing BBX32. Thus, it is expected that disclosed B-box polynucleotides and B-box polypeptides, and closely related orthologs and paralogs, will also improve yield in plants relative to control plants, including in leguminous species, even in the absence of overt abiotic stresses.

[0219] It is expected that the disclosed methods may be applied to identify other useful and valuable sequences of the present polypeptide clades, and the sequences may be derived from a diverse range of plant species. These sequences and/or the sequences provided in the Sequence Listing may be introduced into plants other than Arabidopsis (e.g., crop plants), and by expressing said sequences may thus be made more tolerant than controls to water deprivation assays, nitrogen-limiting conditions or cold, and/or produce greater yield. It is expected that said plants under these conditions are greener, more vigorous, will have better survival rates than controls, or will recover better from these treatments than control plants.

### Example V

### Results

[0220] The data presented herein present the results obtained in experiments with polynucleotides and polypeptides that may be expressed in plants in order to obtain advantageous traits in said plants including improved yield under non-stressed or low stress conditions, or for reduced yield losses under biotic and abiotic stress conditions.

[0221] We have previously demonstrated that under a variety of conditions, including unstressed, nutrient stress, or osmotic stress conditions, Arabidopsis seedlings ectopically expressing AtBBX32 showed increased hypocotyl growth rates and altered transcription of genes associated with light regulated signal transduction and photosynthesis. Soybean plants ectopically expressing AtBBX32 were taller, tended to have more nodes, pods, and flowers, greater late season canopy coverage, improved late season vigor, in some cases had thicker stems, and ultimately had significantly higher broad acre yield than wild-type soybean plants did (e.g., see Creelman et al., U.S. Pat. No. 7,692,067). Based on a phylogenetic analysis of the soybean B-box family, G4004 (also referred to as Glycine max BBX53 or GmBBX53, and listed as SEQ ID NO: 432 or 532), GmBBX52 variant (SEQ ID NO: 434) and GmBBX52 (SEQ ID NO: 530) were identified as the soybean orthologs of the Arabidopsis AtBBX32 gene. Like AtBBX32, both soybean genes contain a single N-terminus B-box domain. Both soybean genes had diurnal oscillations in transcript abundance. Arabidopsis plants overexpressing either GmBBX52 or GmBBX53 displayed increased hypocotyl growth rates and altered transcription of genes associated with light regulated signal transduction and photosynthesis, similar to plant lines overexpressing AtBBX32. In order to better understand the biological role of GmBBX52 and GmBBX53 genes on soybean yield, we generated constructs that would constitutively express either GmBBX52 or GmBBX53 or knockdown both GmBBX52 and GmBBX53 transcript levels. Eight independently generated plants from both the GmBBX52 constitutive over-expression construct and the GmBBX52/GmBBX53-miRNA constructs and four independent events from the GmBBX53 over-expression construct were tested in broad acre yield trials. Lines ectopically over-expressing GmBBX52 yielded, on average, 6.1% more bushels per acre than did wild-type control plants, while the top performing line yielded 9.0% more bushels per acre. Lines ectopically over-expressing GmBBX53 yielded 4.1% higher than the wild-type control, while the top event improved yield by 6.7% over the wild-type control. In contrast, miRNA mediated suppression of GmBBX52 and GmBBX53 transcript levels led to a significant decrease in GmBBX52 RNA levels and decreased yield. GmBBX52/GmBBX53-miRNA lines yielded, on average, 5.5% fewer bushels per acre than control lines while the lowest yielding line across the eight produced 11.8% fewer bushels per acre relative to controls. These data demonstrate that the ectopic expression of the soybean homologs of AtBBX32, GmBBX52 and GmBBX53, led to yield improvements similar to that of soybean plants expressing the Arabidopsis gene.

[0222] We then examined several independently transformed Arabidopsis lines overexpressing other disclosed B-box polynucleotides. The level of gene expression is expected to vary in each line, which is likely to result in a range of hypocotyl lengths. Lines with hypocotyl lengths similar to the controls are likely to lack any significant expression from the transgene. On the other hand, an increase in hypocotyl length may be attributed to the transgene, either through an indirect effect or directly through overexpression of the specific B-box transgene. Increased hypocotyl lengths of multiple independent transformants of the same gene can be used to correlate the reduced light responsiveness to increased gene expression. Using this method, a number of independent Arabidopsis transgenic lines carrying 35S::AtBBX28:cMYC were found to have longer hypocotyls than control lines transformed with an empty vector control (pMEN 65), and some of the 35S::AtBBX28:cMYC lines had hypocotyl lengths similar to BBX32-over-expressing seedlings (FIG. 1). These data suggest that seedlings overexpressing AtBBX28 are hyposensitive to red light implying that AtBBX28 functions negatively in light signal transduction.

[0223] BBX32 improves crop performance and is thought to repress the transcriptional activity of another B-box protein, AtBBX21 (SEQ ID NO: 56) on its native target promoter (prCHS) sequences (unpublished data). To test whether AtBBX28 (SEQ ID NO: 2) can also repress gene expression, we co-transformed prCHS::GUS reporter constructs with HA:AtBBX21 or in combination with HA:AtBBX28, HA: BBX32 or CAT (used as control) in Arabidopsis. Our results show that HA:AtBBX28 inhibited the transcriptional activity of HA:AtBBX21 to levels similar to the repression by HA: BBX32 (FIG. 2). These data suggest that AtBBX28 is able to act as a repressor like BBX32. AtBBX28 may have common targets with BBX32 (FIG. 2) or it may act on specific targets independently of BBX32. Other B-box proteins were analyzed for their potential roles in light signaling. Seedlings of several independently transformed Arabidopsis lines transformed with B-box genes were grown under red light to examine the effects on hypocotyl length. As seen in FIGS. 3 and 4, we identified 8 additional B-box genes which, when constitutively expressed, produced longer hypocotyls in light. The levels of expression of these genes in the transgenic lines are not yet known, but as expected the magnitude of the hypocotyl length phenotype varied greatly between independent transformants of the same gene. These results indicate that AtBBX25 (G1894, SEQ ID NO: 154), AtBBX26 (G1486, SEQ ID NO: 52), AtBBX30 (G1478, SEQ ID NO: 40), AtBBX7 (G2440, SEQ ID NO: 104), AtBBX24 (G329, SEQ ID NO: 152), AtBBX20 (G1888, SEQ ID NO: 54), AtBBX19 (G902, SEQ ID NO: 200), and AtBBX18 (G1881, SEQ ID NO: 202) function to suppress light signaling. One or more of these genes can be used to alter light sensitivity leading to increased crop yield and stress tolerance.

### AtBBX32 Modulates Expression of Soybean BBX Proteins

[0224] A microarray analysis was performed to examine the expression of AtBBX32 on the modulation of gene expression in field grown soybean sampled at five time points: 3:00 am, 6:00 am (dawn), 9:00 am, noon, and 3:00 pm. The expression of AtBBX32 in soybean affected the abundance of specific gene transcripts with the majority of these changes in gene expression occurring at dawn as shown in FIG. 11.

[0225] Phylogenetic analyses of the Arabidopsis thaliana and Glycine max B-box gene families were conducted for the purpose of identifying functional similarities of proteins in the B-box family (FIGS. 12, 13 and 14). The phyogenetic trees were generated using an in-house proprietary database and clustalW analysis clusters to group sequences based on the domain structure of the proteins. The genomes of both species contain large families of B-box domain genes; the Arabidopsis genome contains 32 predicted B-box domain proteins, while the paleopolyploid soybean genome contains 61 B-box containing genes. The phylogenetic analysis conducted using 32 B-box sequences from Arabidopsis thaliana and 61 B-box sequences from Glycine max grouped the Arabidopsis and soybean sequences into five structural groups and seventeen clades (FIG. 12). A phylogenetic tree specific for the 61 B-box sequences from soybean is shown in FIG. 13. Two of the soybean B-box sequences showed a shift in the time of peak expression. Three sequences were induced significantly at dawn and thirteen were down-regulated in the At.BBX32 transgenic soybean plants (FIG. 13). A single B-box clade is further represented in FIG. 14 for Arabidopsis thaliana and Glycine max sequences. Within the phylogenetic grouping of AtBBX32-like single B-box domain containing genes, thirteen B-box genes from Glycine max grouped with seven Arabidopsis single B-box genes. Phylogenetic analysis indicates that GmBBX52 and GmBBX53 are orthologs of the Arabidopsis thaliana AtBBX32 gene.

### Utilities of B-Box Polynucleotides, Polypeptides and Phylogenetically-Related Sequences

[0226] Based on the data obtained in the instantly disclosed Examples, a total of nine Arabidopsis B-box genes and several GmBBX genes that function negatively in light signaling have been identified, and it is expected that either independently or in combination with other genes or specific promoters (for example, heterologous promoters, or constitutive, inducible, diurnally-regulated, tissue-enhanced, tissue-preferred, or tissue-specific promoters), these genes will provide significantly improved yield benefits and resistance to abiotic stress.

[0227] Sequences that are orthologous, i.e., full length sequences or modified sequences that share significant sequence identity or similarity, to those provided in the Sequence Listing, may be derived from any of a wide variety of plants, including but not limited to, the plant families Myrtaceae, Pinaceae, Salicaceae, Leguminosae, Umbelliferae, Cruciferae, Curcurbitaceae, Solanaceae, Brassicaceae, or from the plants Arabidopsis thaliana, soybean, potato, cotton, rape, oilseed rape (including canola), sunflower, alfalfa, clover; or fruits and vegetables, such as banana, blackberry, blueberry, strawberry, and raspberry, cantaloupe, carrot, cauliflower, coffee, cucumber, eggplant, mint, grapes, honeydew, lettuce, mango, melon, onion, papaya, peas, beans, peppers, pineapple, pumpkin, spinach, squash, tobacco, tomato, tomatillo, watermelon, rosaceous fruits (such as apple, peach, pear, cherry and plum), vegetable brassicas (such as broccoli, cabbage, cauliflower, Brussels sprouts, and kohlrabi), barley; rye; millet; sorghum; currant; avocado; citrus fruits such as oranges, lemons, grapefruit and tangerines, artichoke, cherries; nuts such as the walnut and peanut; endive; leek; roots such as arrowroot, beet, cassava, turnip, radish, yam, sweet potato, wheat, corn or sweet corn (maize), rice, wild rice, sugarcane, bamboo, oats, turfgrass, brome-grass, Miscanthus, pampas grass, or switchgrass (Panicum). In addition, homologous sequences may be derived from plants that are evolutionarily-related to crop plants, but which may not have yet been used as crop plants. Examples include deadly nightshade (Atropa belladona), related to tomato; jimson weed (Datura strommium), related to peyote; and teosinte (Zea species), related to corn (maize).

[0228] Transgenic plants (or plant cells, or plant explants, or plant tissues) incorporating the disclosed polynucleotides and expressing the disclosed polypeptides or orthologs of the disclosed polypeptides can be produced by a variety of well-established techniques as described in the Examples. After construction of a nucleic acid vector, including an expression vector or cassette, including one or more polynucleotides encoding one or more B-box transcriptional regulators or B-box transcriptional regulator orthologs, standard techniques can be used to introduce the vector into a plant, a plant cell, a plant explant or a plant tissue of interest. Optionally, the plant cell, explant or tissue can be regenerated to produce a transgenic plant.

[0229] The plant can be any higher plant, including gymnosperms, monocotyledonous and dicotyledonous plants. Suitable protocols are available for Leguminosae (alfalfa, soybean, clover, etc.), Umbelliferae (carrot, celery, parsnip), Cruciferae (cabbage, radish, rapeseed, broccoli, etc.), Curcurbitaceae (melons and cucumber), Poaceae (formerly Gramineae, including wheat, corn, rice, barley, millet, etc.), Solanaceae (potato, tomato, tobacco, peppers, etc.), and various other crops. See protocols described in Ammirato et al., 1984; Shimamoto et al. 1989; Fromm et al., 1990; and Vasil et al., 1990).

Identification of Interacting Partners with AtBBX32

[0230] Genetic and biochemical approaches were employed to identify proteins that may interact with AtBBX32 in transgenic soybean plants. Engineering of crop plants with polynucleotides that encode or suppress such proteins may improve yield and other agronomic traits.

### Yeast 2-Hybrid Screen

[0231] In order to identify BBX32 binding partners that may be involved in the regulation of AtBBX32 in overexpressing transgenic soybean, a yeast 2-hybrid (Y2H) screen was carried out using full length and truncatedAtBBX32 and the soy orthologGmBBX52 as baits in a total of 6 screens against a soybean cDNA library (Table 7). The six BBX32 baits from Table 7 were subcloned into pUC vectors and then recloned as LexA fusion constructs for use in Y2H screens. Most bait constructs were prepared in the pB27 background, which placed the LexA gene at the N terminus of the bait sequence. Other vector backbones include pB29 for C terminal LexA fusions and pB6 for N terminal Gal4 fusions. Two control screens were also performed using GmCOP1-like protein and GmPABP-like (Poly A binding protein) protein as baits (data not shown).

[0232] A random primed library was made from total RNA isolated from wild-type non-transgenic V5 soy leaves harvested at 4 hr intervals during a 14 hr diurnal cycle as well as from dark germinated soy seedlings. The two uppermost leaf tri-foliates, shoot, and meristem tissues were harvested from V5 stage soy plants at 3 am, 7 am, 11 am, 3 pm, 7 pm, and 11 pm. Whole seedlings were collected at a single time point. All tissues were harvested from plants grown in the growth chamber where lights were turned on at 5 am and off at 7 pm. RNA was isolated from all tissues for preparation of a cDNA library in the appropriate prey vector. The two-hybrid screens were performed by Hybrigenics Services.

[0233] Interacting clones were isolated and sequenced. Combining all six screens, approximately 471 interacting contigs were identified. Contigs are defined as an interacting fragment of a particular sequence. Separate contigs may represent overlapping portions of the same mRNA. Furthermore, some contigs identified in separate screens may be identical, thus reducing the total number of contigs identified. Translated BLAST searches against the public database revealed approximately 45 groups of contigs and 57 single contigs (including 333 different contigs) with similarity to Arabidopsis genes. An additional three contig groups did not show significant homology to publicly available gene sequences. Six contig groups did not show significant homology to genes within the Arabidopsis genome nor to the map to known soy genes. Of the remaining single contigs that map to soy gene sequences, approximately 107 showed no matches to known plant genes.

TABLE 7
Bait insert sequences tested against the soy DNA library described above.
Italicized sequence in N and C terminal baits contained overlap regions
present in both bait constructs.

| Bait | Sequence | Nucleotides |
|---|---|---|
| N-terminal | MVSFCELCGAEADLHCAADSAFLCRSCDAKFHASNFLFARHFRRVICP | 1-222 |
| At.BBX32 | NCKSLTQNFVSGPLLPWPPRTTCCSE | |
| C-terminal | TQNFVSGPLLPWPPRTTCCSESSSSSCCSSLDCVSSSELSSTTRDVNR | 160-678 |
| At.BBX32 | ARGRENRVNAKAVAVTVADGIFVNWCGKLGLNRDLTNAVVSYASLALA | |
| | VETRPRATKRVFLAAAFWFGVKNITTWQNLKKVEDVTGVSAGMIRAVE | |
| | SKLARAMTQQLRRWRVDSEEGWAENDNV | |
| Full length | MVSFCELCGAEADLHCAADSAFLCRSCDAKFHASNFLFARHFRRVICPNC | 1-678 |
| At.BBX32 | KSLTQNFVSGPLLPWPPRTTCCSESSSSSCCSSLDCVSSSELSSTTRDVN | |
| | RARGRENRVNAKAVAVTVADGIFVNWCGKLGLNRDLTNAVVSYASLALAV | |
| | ETRPRATKRVFLAAAFWFGVKNTTTWQNLKKVEDVTGVSAGMIRAVESKL | |
| | ARAMTQQLRRWRVDSEEGWAENDNV | |
| N-terminal | MKPKTCELCHQLASLYCPSDSAFLCFHCDAAVHAANFLVARHLRRLLCS | 1-228 |
| Gm.BBX52 | KCNRFAAIHISGAISRHLSSTCTSCSL | |
| C-terminal | AAIHISGAISRHLSSTCTSCSLEIPSADSDSLPSSSTCVSSSESCSTNQI | 163-732 |
| Gm.BBX52 | KAEKKRRRRRRSFSSSSVTDDASPAAKKRRRNGGSVALVFEKWSREIGLG | |
| | LGVNGNRVASNALSVCLGKWRSLPFRVAAATSFVVLGLRFCGDRGLATCQ | |
| | NLARLEAISGVPAKLILGAHANLARVFTHRRELQEGWGES | |
| Full length | MKPKTCELCHQLASLYCPSDSAFLCFHCDAAVHAANFLVARHLRRLLCS | 1-732 |
| Gm.BBX52 | KCNRFAAIHISGAISRHLSSTCTSCSLEIPSADSDSLPSSSTCVSSSES | |
| | CSTNQIKAEKKRRRRRRSFSSSSVTDDASPAAKKRRRNGGSVAEVFEKW | |
| | SREIGLGLGVNGNRVASNALSVCLGKWRSLPFRVAAATSFVVLGLRFCG | |
| | DRGLATCQNLARLEAISGVPAKLILGAHANLARVETHRRELQEGWGES | |

[0234] Analysis of the Y2H prey identified in each screen revealed several consistent patterns of potential interaction. In general, the N-terminal, B-Box containing region of both the AtBBX32 and Gm BBX32 proteins showed potential interaction with other B-Box proteins. Many of the potentially interacting proteins are expressed during a timeframe in which AtBBX32 overexpression has been shown to influence expression of the most mRNAs in growth chamber experiments (2 hr predawn and dawn). At a molecular level, AtBBX32 overexpression resulted in marked changes in mRNA expression for a number of nuclear genes, suggesting that AtBBX32 plays a role in transcriptional regulation (FIG. 11). As a putative component of the transcriptional network, it is likely that BBX32 functions through interactions with other proteins. Taken together, these data indicate that, like BBX32, these genes may modulate a variety of traits, including yield, when overexpressed or suppressed in plants.

[0235] AtBBX32 putative interacting proteins from the yeast 2 hybrid screens were identified and are further described in the phylogenetic tree in FIGS. 12 and 13. Several possible interacting proteins of GmBBX52 were also identified from yeast 2 hybrid screens. For example, GmG1481(GmBBX62) was identified and is proposed to function in protein-protein stabilization and could facilitate light signaling in leaves, roots and nodules. The interaction of BBX32 with B-box proteins may also help in stabilizing the nuclear complex. Together such a complex could lead to altered gene expression of key regulatory and metabolic genes resulting in enhanced vigor, growth and yield.

### AtBBX32 and GmBBX62 are Physically Associated In Vivo

[0236] To confirm the interaction between AtBBX32 and GmBBX62 identified through Y2H screening, the ability of AtBBX32 to associate with GmBBX62 in vivo was tested. AtBBX32::GFP and Flag::GmBBX62 fusion proteins were transiently co-expressed in soybean protoplasts. Soybean protoplasts were isolated from 4-6 mm cotyledons and transformed as described by Abel and Theologis, 1994. Approximately 1×10⁶ protoplasts were transformed in 15 mL Falcon conical tubes with 90 μg of Qiagen prepped plasmid DNA. Protoplasts were then incubated at 22° C. for 18 to 24 hours, and harvested at 150×g for 3 minutes and lysed with lysis buffer (50 mM Tris pH 7.8, 150 mM NaCl, 1% Triton-X 100 and Complete Protease Inhibitor (Roche) for 1 hr on ice with vortex mixing every 15 mM The lysate was centrifuged for 5 min at 3000×g and soluble fractions were retained for use in Luminex-based co-immunoprecipitation assays.

[0237] Luminex co-immunoprecipitation (co-IP) assay was carried out using the miniaturized sandwich immunoassay and co-IP method with modifications, Poetz et al., 2009. This combination of co-IP and sandwich immunoassay allows the relative quantification of components of the complex. Briefly, antibodies for GFP (MBL International, D153-3) and FLAG (Bethyl Laboratories, A190-101A) were covalently coupled to carboxylated fluorescent microspheres (Luminex) according to the manufacturer's protocol. Fifty pi of protoplast cell lysate (above) was aliquoted to three different wells in a 96 well clear flat-bottom plate (Bio-Rad) for Luminex assays. To each sample, 50 μl of conjugated beads was added to each appropriate well and incubated for 30 minutes with shaking. Forward and reverse co-IPs were performed with anti-GFP conjugated beads and anti-FLAG conjugated beads. Beads were captured for 2 minutes and washed three times with PBST (137 mM NaCl, 8.1 mM Na₂HPO₄, 2.68 mM KCl, 1.47 mM KH₂PO₄, and 0.05% Tween-20). Biotinylated GFP (ab6658, 1:1000; Abcam) and FLAG (A190-101B, 1:1000; Bethyl) antibodies were added to appropriate wells. The plate was incubated on a shaker for 30 minutes. After washing, 100 μl of reporter NeutrAvidin R-phycoerythrin at a 1:1000 dilution was added to each well and incubated for 30 minutes with subsequent washing. Each well was resuspended in 100 μl of PBST buffer before plates were analyzed using FLEX MAP 3D system (Luminex Corp, Austin, Tex.). Approximately 100 beads were measured per sample to determine the median fluorescence intensity (MFI).

[0238] A co-immunoprecipitation (co-IP) experiment was performed with the co-expressed soybean protoplast extracts using an antibody against GFP. The protein complex was captured via the immobilized GFP antibody and the associated components within the complex were detected via anti-FLAG antibody and visualized using phycoerythrin-conjugated reporter molecules. As shown in FIG. 15A, the median fluorescence intensity (MFI) from cell extracts co-expressing AtBBX32::GFP and Flag::GmBBX62 is significantly higher (6-fold) than the control samples, including non-transfected cells and cell extracts lacking either AtBBX32::GFP or FLAG::GmBBX62. As expected, low fluorescence signals for the single gene construct samples did not show a significant difference from non-transfected cell extract, suggesting that these signals represent non-specific binding. A reciprocal co-IP experiment with anti-FLAG antibody-immobilized beads was also performed. The presence of AtBBX32::GFP within the complex was detected by anti-GFP antibody. Similarly, the fluorescence intensity for the co-expressed cell extract exhibited a 5-fold increase compared to the controls (FIG. 15B). The results indicate that AtBBX32 and GmBBX62 physically interact in soybean cells, further demonstrating the biological relevance of GmBBX62 as a partner of AtBBX32.

### AtBBX32 Binds GmBBX62 In Vitro

[0239] In vitro pull-down and ELISA-based protein-protein interaction assays were also conducted to confirm the binding of AtBBX32 with GmBBX62. Purified FLAG::GmBBX62 was bound to anti-FLAG M2 agarose resin and incubated with soluble protein extracts from wheat germ lysate expressing AtBBX32. The beads were pelleted and washed, and the bound protein complexes were eluted using SDS-PAGE loading buffer. The eluted protein complexes were identified by western blotting analysis. As expected, FLAG::GmBBX62 was detected with anti-Flag antibody from FLAG-GmBBX62-bound beads (FIG. 16A), confirming the presence of the GmBBX62 protein in reactions. AtBBX32 within the protein complex was detected with anti-AtBBX32 antibody from FLAG::GmBBX62 beads but not from the negative controls (FIG. 16B), demonstrating that FLAG::GmBBX62 can bind to AtBBX32 in vitro.

Co-Immunoprecipitation of AtBBX32 with GmBBX39 and Bead-Based Fluorescence Detection

[0240] Bead-based co-IP assays with Luminex on-bead detection method was used to confirm the interaction between the AtBBX32 and GmBBX39 proteins. Pairs of potential interacting proteins were co-expressed in soybean cotyledon protoplasts as described above.

[0241] Capture antibodies for GFP (MBL International, D153-3), Myc (Bethyl Laboratories cat # A190-104A) and FLAG (Bethyl Laboratories, A190-101A) were covalently coupled to carboxylated fluorescent microspheres (Luminex) according to the manufacturer's protocol. Luminex two-step Carbodimide coupling protocol was modified as follows: 3.5×10⁶ beads were conjugated to 15 μg of antibody and resuspended in coupling buffer containing 100 mM MES pH 6. Biotinylated antibodies for GFP (Abcam, ab6658), Myc (Bethyl Laboratories cat # A190-104B) and FLAG (Bethyl laboratories, A190-101B) were used for detection of interacting proteins in the miniaturized sandwich immunoassay. NeutrAvidin R-phycoerythrin was used as the reporter assay reagent (Invitrogen, A2660).

[0242] Protein input for BBX32::GFP and interactions were detected using the miniaturized sandwich immunoassay and co-IP method (Poetz, et al., 2009). Protein complexes were captured from extracts on antibody-conjugated beads, and the bound partner proteins were detected with biotinylated antibodies. NeutrAvidin R-phycoerythrin provided a fluorescence read-out for the quantity of bound detection antibody. Interacting proteins were defined as pairs of potential interacting proteins that yielded a greater median fluorescence intensity (MFI) than any of the controls (single protein expressed or untransformed cells) with a p-value <0.001 and a change in MFI that was 4-fold or greater when compared to each of the controls.

[0243] To assess the potential interaction between AtBBX32 and GmBBX39, two experiments were conducted consisting of a total of three repetitions (exp. 1, n=1; exp. 2, n=2). BBX32::GFP was co-expressed with FLAG::GmBBX39 in soybean cotyledon protoplasts. Expression analyses on one replicate of each treatment using either Luminex (BBX32::GFP) or Western blot (FLAG::BBX39) detection confirmed that each protein was expressed at detectable levels (data not shown). When co-expressed in protoplasts, BBX32::GFP and FLAG::BBX39 co-precipitated with either anti-GFP or anti-FLAG beads (FIG. 17). BBX32::GFP did not co-IP with anti-FLAG beads in the absence of FLAG::BBX39 and FLAG::BBX39 did not co-IP with anti-GFP beads in the absence of BBX32::GFP. These results demonstrate that AtBBX32 and GmBBX39 physically interact in soybean protoplasts. Similar experiments also demonstrated physical interactions between GmBBX39 and GmBBX62, between GmBBX52 and GmBBX39, and between GmBBX52 and GmBBX62 (data not shown).

### REFERENCES CITED

[0244] Abel and Theologis (1994) Plant J. 5: 421-427
[0245] Aldemita and Hodges (1996) Planta 199: 612-617
[0246] Altschul (1990) J. Mol. Biol. 215: 403-410
[0247] Altschul (1993) J. Mol. Evol. 36: 290-300
[0248] Ammirato et al., eds. (1984), Handbook of Plant Cell Culture—Crop Species, Macmillan Publ. Co., New York, N.Y.
[0249] Anderson and Young (1985) “Quantitative Filter Hybridisation”, In: Hames and Higgins, ed., Nucleic Acid Hybridisation, A Practical Approach. Oxford, IRL Press, 73-111
[0250] Ausubel et al. (1997) Short Protocols in Molecular Biology, John Wiley & Sons, New York, N.Y., unit 7.7
[0251] Babic et al. (1998) Plant Cell Reports 17: 183-188
[0252] Bairoch et al. (1997) Nucleic Acids Res. 25: 217-221
[0253] Bechtold and Pelletier (1998) Methods Mol. Biol. 82: 259-266
[0254] Berger and Kimmel (1987), “Guide to Molecular Cloning Techniques”, in Methods in Enzymology, vol. 152, Academic Press, Inc., San Diego, Calif.
[0255] Bevan (1984) Nucleic Acids Res. 12: 8711-8721
[0256] Borevitz et al. (2000) Plant Cell 12: 2383-2393
[0257] Boss and Thomas (2002) Nature, 416: 847-850
[0258] Bruce et al. (2000) Plant Cell 12: 65-79
[0259] Cassas et al. (1993) Proc. Natl. Acad. Sci. USA 90: 11212-11216
[0260] Cheikh et al. (2003) U.S. Patent Application No. US20030101479
[0261] Christou et al. (1987) Proc. Natl. Acad. Sci. USA 84: 3962-3966
[0262] Christou (1991) Bio/Technol. 9:957-962
[0263] Christou et al. (1992) Plant. J. 2: 275-281
[0264] D'Halluin et al. (1992) Plant Cell 4: 1495-1505
[0265] Daly et al. (2001) Plant Physiol. 127: 1328-1333
[0266] Deshayes et al. (1985) EMBO J., 4: 2731-2737
[0267] Donn et al. (1990) in Abstracts of VIIth International Congress on Plant Cell and Tissue Culture IAPTC, A2-38: 53
[0268] Doolittle, ed. (1996) Methods in Enzymology, vol. 266: “Computer Methods for Macromolecular Sequence Analysis” Academic Press, Inc., San Diego, Calif., USA
[0269] Draper et al. (1982) Plant Cell Physiol. 23: 451-458
[0270] Eddy (1996) Curr. Opin. Str. Biol. 6: 361-365
[0271] Eisen (1998) Genome Res. 8: 163-167
[0272] Feng and Doolittle (1987) J. Mol. Evol. 25: 351-360
[0273] Fowler and Thomashow (2002) Plant Cell 14: 1675-1690
[0274] Fromm et al. (1990) Bio/Technol. 8: 833-839
[0275] Fu et al. (2001) Plant Cell 13: 1791-1802
[0276] Gelvin et al. (1990) Plant Molecular Biology Manual, Kluwer Academic Publishers
[0277] Gilmour et al. (1998) Plant J. 16: 433-442
[0278] Goodrich et al. (1993) Cell 75: 519-530
[0279] Gordon-Kamm et al. (1990) Plant Cell 2: 603-618
[0280] Gruber et al., in Glick and Thompson (1993) Methods in Plant Molecular Biology and Biotechnology. eds., CRC Press, Inc., Boca Raton
[0281] Haake et al. (2002) Plant Physiol. 130: 639-648
[0282] Hain et al. (1985) Mol. Gen. Genet. 199: 161-168
[0283] Haymes et al. (1985) Nucleic Acid Hybridization: A Practical Approach, IRL Press, Washington, D.C.
[0284] He et al. (2000) Transgenic Res. 9: 223-227
[0285] Hein (1990) Methods Enzymol. 183: 626-645
[0286] Henikoff and Henikoff (1989) Proc. Natl. Acad. Sci. USA 89:10915
[0287] Henikoff and Henikoff (1991) Nucleic Acids Res. 19: 6565-6572
[0288] Herrera-Estrella et al. (1983) Nature 303: 209
[0289] Hiei et al. (1994) Plant J. 6:271-282
[0290] Hiei et al. (1997) Plant Mol. Biol. 35:205-218
[0291] Higgins and Sharp (1988) Gene 73: 237-244
[0292] Higgins et al. (1996) Methods Enzymol. 266: 383-402
[0293] Ishida (1990) Nature Biotechnol. 14:745-750
[0294] Jaglo et al. (2001) Plant Physiol. 127: 910-917
[0295] Kashima et al. (1985) Nature 313: 402-404
[0296] Khanna et al. (2006) Plant Cell 18, 2157-2171
[0297] Kim et al. (2001) Plant J. 25: 247-259
[0298] Kimmel (1987) Methods Enzymol. 152: 507-511
[0299] Klee (1985) Bio/Technology 3: 637-642
[0300] Klein et al. (1987) Nature 327: 70-73
[0301] Koornneef et al (1986) In Tomato Biotechnology: Alan R. Liss, Inc., 169-178
[0302] Ku et al. (2000) Proc. Natl. Acad. Sci. USA 97: 9121-9126
[0303] Kyozuka and Shimamoto (2002) Plant Cell Physiol. 43: 130-135
[0304] Lin et al. (1991) Nature 353: 569-571
[0305] Mandel (1992a) Nature 360: 273-277
[0306] Mandel et al. (1992b) Cell 71-133-143
[0307] Meyers (1995) Molecular Biology and Biotechnology, Wiley VCH, New York, N.Y., p 856-853
[0308] Miki et al. (1993) in Methods in Plant Molecular Biology and Biotechnology, p. 67-88, Glick and Thompson, eds., CRC Press, Inc., Boca Raton
[0309] Mount (2001), in Bioinformatics: Sequence and Genome Analysis, Cold Spring Harbor Laboratory Press, Cold Spring Harbor, N.Y., p. 543
[0310] Müller et al. (2001) Plant J. 28: 169-179
[0311] Nandi et al. (2000) Curr. Biol. 10: 215-218
[0312] Niman et al. (1983). Proc. Natl. Acad. Sci. U.S.A. 80: 4949-4953
[0313] Peng et al. (1997) Genes Development 11: 3194-3205
[0314] Peng et al. (1999) Nature 400: 256-261
[0315] Poetz, O., K. Luckert, et al. (2009) Anal. Biochem. 395:244-248
[0316] Putterill et al. (1995) Cell 80: 847-857
[0317] Ratcliffe et al. (2001) Plant Physiol. 126: 122-132
[0318] Reeves and Nissen (1990) J. Biol. Chem. 265, 8573-8582
[0319] Reeves and Nissen (1995). Prog. Cell Cycle Res. 1: 339-349
[0320] Riechmann et al. (2000a) Science 290, 2105-2110
[0321] Riechmann and Ratcliffe (2000b) Curr. Opin. Plant Biol. 3, 423-434
[0322] Rieger et al. (1976) Glossary of Genetics and Cytogenetics: Classical and Molecular, 4th ed., Springer Verlag, Berlin
[0323] Robson et al. (2001) Plant J. 28: 619-631
[0324] Sadowski et al. (1988) Nature 335: 563-564
[0325] Sambrook et al. (1989) Molecular Cloning: A Laboratory Manual, 2nd Ed., Cold Spring Harbor Laboratory, Cold Spring Harbor, N.Y.
[0326] Sanford et al. (1987) Part. Sci. Technol. 5:27-37
[0327] Sanford (1993) Methods Enzymol. 217: 483-509
[0328] Shimamoto et al. 1989; Nature 338: 274-276
[0329] Shpaer (1997) Methods Mol. Biol. 70: 173-187
[0330] Smith et al. (1992) Protein Engineering 5: 35-51
[0331] Sonnhammer et al. (1997) Proteins 28: 405-420
[0332] Spencer et al. (1994) Plant Mol. Biol. 24: 51-61
[0333] Suzuki et al. (2001) Plant J. 28: 409-418
[0334] Thompson et al. (1994) Nucleic Acids Res. 22: 4673-4680
[0335] Tudge (2000) in The Variety of Life, Oxford University Press, New York, N.Y. pp. 547-606
[0336] Vasil et al. (1990) Bio/Technol. 8: 429-434
[0337] Vasil et al. (1992) Bio/Technol. 10:667-674
[0338] Vasil et al. (1993) Bio/Technol. 11:1553-1558
[0339] Vasil (1994) Plant Mol. Biol. 25: 925-937
[0340] Wahl and Berger (1987) Methods Enzymol. 152: 399-407
[0341] Wan and Lemeaux (1994) Plant Physiol. 104: 37-48
[0342] Weeks et al. (1993) Plant Physiol. 102:1077-1084
[0343] Weigel and Nilsson (1995) Nature 377: 482-500
[0344] Weissbach and Weissbach (1989) Methods for Plant Molecular Biology, Academic Press
[0345] Wu (ed.) Meth. Enzymol. (1993) vol. 217, Academic Press
[0346] Zhang et al. (1991) Bio/Technology 9: 996-997

[0347] All publications and patent applications mentioned in this specification are herein incorporated by reference to the same extent as if each individual publication or patent application was specifically and individually indicated to be incorporated by reference.

[0348] The present disclosure is not limited by the specific embodiments described herein. The disclosure now being fully described, it will be apparent to one of ordinary skill in the art that many changes and modifications can be made thereto without departing from the spirit or scope of the appended claims. Modifications that become apparent from the foregoing description and accompanying figures fall within the scope of the claims.

1-31. (canceled)

32. A method for modifying a trait in a plant, the method comprising the steps of:
providing a target plant comprising at least one recombinant polynucleotide comprising at least one nucleotide sequence that encodes a polypeptide, wherein the nucleotide sequence is selected from the group consisting of:
(a) a nucleotide sequence set forth as SEQ ID NO: 1, 3, 5, 7, 9, 11, 13, 15, 17, 19, 21, 23, 25, 27, 29, 31, 33, 35, 37, 39, 41, 43, 45, 47, 49, 51, 53, 55, 57, 59, 61, 63, 65, 67, 69, 71, 73, 75, 77, 79, 81, 83, 85, 87, 89, 91, 93, 95, 97, 99, 101, 103, 105, 107, 109, 111, 113, 115, 117, 119, 121, 123, 125, 127, 129, 131, 133, 135, 137, 139, 141, 143, 145, 147, 149, 151, 153, 155, 157, 159, 161, 163, 165, 167, 169, 171, 173, 175, 177, 179, 181, 183, 185, 187, 189, 191, 193, 195, 197, 199, 201, 203, 205, 207, 209, 211, 213, 215, 217, 219, 221, 223, 225, 227, 229, 231, 233; 435, 437, 439, 441, 443, 445, 447, 449, 451, 453, 455, 457, 459, 461, 463, 465, 467, 469, 471, 473, 475, 477, 479, 481, 483, 485, 487, 489, 491, 493, 495, 497, 499, 501, 503, 505, 507, 509, 511, 513, 515, 517, 519, 521, 523, 525, 527, 529, 531, 533, 535, 537, 539, 541, 543, 545, 547, or 549;
(b) a nucleotide sequence encoding SEQ ID NO: 2, 4, 6, 8, 10, 12, 14, 16, 18, 20, 22, 24, 26, 28, 30, 32, 34, 36, 38, 40, 42, 44, 46, 48, 50, 52, 54, 56, 58, 60, 62, 64, 66, 68, 70, 72, 74, 76, 78, 80, 82, 84, 86, 88, 90, 92, 94, 96, 98, 100, 102, 104, 106, 108, 110, 112, 114, 116, 118, 120, 122, 124, 126, 128, 130, 132, 134, 136, 138, 140, 142, 144, 146, 148, 150, 152, 154, 156, 158, 160, 162, 164, 166, 168, 170, 172, 174, 176, 178, 180, 182, 184, 186, 188, 190, 192, 194, 196, 198, 200, 202, 204, 206, 208, 210, 212, 214, 216, 218, 220, 222, 224, 226, 228, 230, 232, 234, 436, 438, 440, 442, 444, 446, 448, 450, 452, 454, 456, 458, 460, 462, 464, 466, 468, 470, 472, 474, 476, 478, 480, 482, 484, 486, 488, 490, 492, 494, 496, 498, 500, 502, 504, 506, 508, 510, 512, 514, 516, 518, 520, 522, 524, 526, 528, 530, 532, 534, 536, 538, 540, 542, 544, 546, 548, 550, or any of SEQ ID NO: 235 to 427; and
(c) a nucleotide sequence encoding a polypeptide wherein the polypeptide has a percentage identity to at least one of SEQ ID NO: 2, 4, 6, 8, 10, 12, 14, 16, 18, 20, 22, 24, 26, 28, 30, 32, 34, 36, 38, 40, 42, 44, 46, 48, 50, 52, 54, 56, 58, 60, 62, 64, 66, 68, 70, 72, 74, 76, 78, 80, 82, 84, 86, 88, 90, 92, 94, 96, 98, 100, 102, 104, 106, 108, 110, 112, 114, 116, 118, 120, 122, 124, 126, 128, 130, 132, 134, 136, 138, 140, 142, 144, 146, 148, 150, 152, 154, 156, 158, 160, 162, 164, 166, 168, 170, 172, 174, 176, 178, 180, 182, 184, 186, 188, 190, 192, 194, 196, 198, 200, 202, 204, 206, 208, 210, 212, 214, 216, 218, 220, 222, 224, 226, 228, 230, 232, 234, 436, 438, 440, 442, 444, 446, 448, 450, 452, 454, 456, 458, 460, 462, 464, 466, 468, 470, 472, 474, 476, 478, 480, 482, 484, 486, 488, 490, 492, 494, 496, 498, 500, 502, 504, 506, 508, 510, 512, 514, 516, 518, 520, 522, 524, 526, 528, 530, 532, 534, 536, 538, 540, 542, 544, 546, 548, 550, or any of SEQ ID NO: 235 to 427;
wherein the nucleotide sequence is operably linked to a promoter that is expressed in a plant cell;
wherein the target plant overexpresses the polypeptide and said overexpression results in the target plant expressing the modified trait;
wherein the percentage identity is selected from the group consisting of at least 50%, at least 51%, at least 52%, at least 53%, at least 54%, at least 55%, at least 56%, at least 57%, at least 58%, at least 59%, at least 60%, at least 61%, at least 62%, at least 63%, at least 64%, at least 65%, at least 66%, at least 67%, at least 68%, at least 69%, at least 70%, at least 71%, at least 72%, at least 73%, at least 74%, at least 75%, at least 76%, at least 77%, at least 78%, at least 79%, at least 80%, at least 81%, at least 82%, at least 83%, at least 84%, at least 85%, at least 86%, at least 87%, at least 88%, at least 89%, at least 90%, at least 91%, at least 92%, at least 93%, at least 94%, at least 95%, at least 96%, at least 97%, at least 98%, at least 99% and 100%;
wherein the modified trait is selected from the group consisting of decreased sensitivity to light, increased yield, greater height, greater stem diameter, greater resistance to lodging, increased branching, increased secondary rooting, greater cold tolerance, greater tolerance to water deprivation, reduced stomatal conductance, altered C/N sensing, increased tolerance to nitrogen limiting conditions, improved late season growth and vigor, greater number of primary nodes, greater late season canopy coverage, increased tolerance to abiotic stress, increased tolerance to hyperosmotic stress, altered levels of ureides, altered levels of hexose sugars, altered sucrose phosphate synthase (SPS) activity, altered levels of starch, and delayed senescence, as compared to a control plant that does not comprise the recombinant polynucleotide; and,
optionally, selecting a transgenic plant having at least one of the modified traits as compared to the control plant.

33. The method of claim 32, wherein the target plant comprises a second recombinant polynucleotide comprising a trans-acting element that controls expression of the polypeptide.

34. The method of claim 33, wherein the target plant expresses a protein encoded by a nucleic acid selected from the group consisting of: SEQ ID NO: 429, SEQ ID NO: 431, SEQ ID NO: 433, and SEQ ID NO: 529.

35. A transgenic plant produced by the method of claim 32, wherein the transgenic plant comprises the at least one recombinant polynucleotide of claim 32.

36. A seed from the transgenic plant of claim 35, wherein the seed comprises the at least one recombinant polynucleotide.

37. A transgenic progeny plant, or a part thereof, produced by growing the seed of claim 36.

38. The transgenic progeny plant of claim 37, wherein the transgenic progeny plant has a modified trait relative to a control plant,
wherein the modified trait is selected from the group consisting of decreased sensitivity to light, increased yield, greater height, greater stem diameter, greater resistance to lodging, increased branching, increased secondary rooting, greater cold tolerance, greater tolerance to water deprivation, reduced stomatal conductance, altered C/N sensing, increased tolerance to nitrogen limiting conditions, improved late season growth and vigor, greater number of primary nodes, greater late season canopy coverage, increased tolerance to abiotic stress, increased tolerance to hyperosmotic stress, altered levels of ureides, altered levels of hexose sugars, altered SPS activity, altered levels of starch, and delayed senescence, as compared to a control plant that does not comprise the recombinant polynucleotide.

39. A tissue culture produced from protoplasts or cells from the transgenic plant of claim 35, wherein said cells or protoplasts are produced from a plant part selected from the group consisting of leaf, pollen, ovule, embryo, cotyledon, hypocotyl, meristematic cell, root, root tip, pistil, anther, flower, seed, shoot, stem, pod and petiole.

40. A regenerated plant regenerated from the tissue culture of claim 39.

41. The method of claim 32, wherein the target plant is stably transformed with the at least one recombinant polynucleotide.

42. The method of claim 32, wherein the promoter is a constitutive, inducible, tissue-specific, tissue-enhanced, cell-enhanced, or cell-specific promoter.

43. The method of claim 32, wherein the promoter:
regulates expression of the polypeptide in vascular, shoot apical meristem, hypocotyl or leaf primordia tissue;
or the promoter is a light-regulated promoter;
or the promoter is a stress-inducible promoter.
or the promoter is a diurnally-regulated promoter.
or the promoter is a chemically-inducible promoter.

44. The method of claim 32, the method steps further comprising:
crossing the target plant with itself, a second plant from the same line as the target plant, a non-transgenic plant, a wild-type plant, or a transgenic plant from a different line of plants, to produce a transgenic seed.

45. The method of claim 32, wherein:
the target plant is a monocot plant, a dicot plant, or a conifer plant; and/or
the at least one nucleotide sequence is derived from the dicot plant, the monocot plant, or the conifer plant; and
optionally, the dicot plant, the monocot plant, or the conifer plant is selected from the group consisting of: the family Pinaceae, cedar, fir, hemlock, larch, pine, spruce, the family Alliaceae, onion, leek, garlic, the family Amaranthaceae, spinach, the family Anacardiaceae, mango, the family Asteraceae, sunflower, endive, lettuce, artichoke, the family Brassicaceae, Arabidopsis thaliana, rape, oilseed rape, canola, cauliflower, turnip, radish, broccoli, cabbage, cauliflower, Brussels sprouts, kohlrabi, the family Bromeliaceae, pineapple, the family Caricaceae, papaya, the family Chenopodiaceae, beet, the family Curcurbitaceae, melon, cantaloupe, squash, watermelon, honeydew, cucumber, pumpkin, the family Dioscoreaceae, yam, the family Ericaceae, blueberry, the family Euphorbiaceae, cassava, the family Fabaceae, alfalfa, clover, peanut, the family Grossulariaceae, currant; the family Juglandaceae, walnut, the family Lamiaceae, mint, the family Lauraceae, avocado, the family Leguminosae, soybean, bean, pea, the family Malvaceae, cotton, the family Marantaceae, arrowroot, the family Myrtaceae, guava, eucalyptus, the family Rosaceae, peach, apple, cherry, plum, pear, prune, blackberry, raspberry, strawberry, the family Rubiaceae, coffee, the family Rutaceae, citrus, orange, lemon, grapefruit, tangerine, the family Salicaceae, poplar, willow, the family Solanaceae, potato, sweet potato, tomato, Capsicum, tobacco, tomatillo, eggplant, Atropa belladona, Datura stramonium, the family Vitaceae, grape, the family Umbelliferae, carrot, the family Musaceae, banana, the family Poaceae, wheat, maize, sweet corn, rice, wild rice, barley, rye; millet, sorghum, sugar cane, turfgrass, bamboo, oats, brome-grass, Miscanthus, pampas grass, switchgrass (Panicum), and teosinte.

46. A method for modifying a trait in a plant, the method comprising the steps of:
introducing into a target plant at least one recombinant polynucleotide that suppresses the expression of at least a polypeptide, wherein the polypeptide is encoded by a polynucleotide comprising a nucleotide sequence selected from the group consisting of:
(a) a nucleotide sequence set forth as SEQ ID NO: 1, 3, 5, 7, 9, 11, 13, 15, 17, 19, 21, 23, 25, 27, 29, 31, 33, 35, 37, 39, 41, 43, 45, 47, 49, 51, 53, 55, 57, 59, 61, 63, 65, 67, 69, 71, 73, 75, 77, 79, 81, 83, 85, 87, 89, 91, 93, 95, 97, 99, 101, 103, 105, 107, 109, 111, 113, 115, 117, 119, 121, 123, 125, 127, 129, 131, 133, 135, 137, 139, 141, 143, 145, 147, 149, 151, 153, 155, 157, 159, 161, 163, 165, 167, 169, 171, 173, 175, 177, 179, 181, 183, 185, 187, 189, 191, 193, 195, 197, 199, 201, 203, 205, 207, 209, 211, 213, 215, 217, 219, 221, 223, 225, 227, 229, 231, 233; 435, 437, 439, 441, 443, 445, 447, 449, 451, 453, 455, 457, 459, 461, 463, 465, 467, 469, 471, 473, 475, 477, 479, 481, 483, 485, 487, 489, 491, 493, 495, 497, 499, 501, 503, 505, 507, 509, 511, 513, 515, 517, 519, 521, 523, 525, 527, 529, 531, 533, 535, 537, 539, 541, 543, 545, 547, or 549;
(b) a nucleotide sequence encoding SEQ ID NO: 2, 4, 6, 8, 10, 12, 14, 16, 18, 20, 22, 24, 26, 28, 30, 32, 34, 36, 38, 40, 42, 44, 46, 48, 50, 52, 54, 56, 58, 60, 62, 64, 66, 68, 70, 72, 74, 76, 78, 80, 82, 84, 86, 88, 90, 92, 94, 96, 98, 100, 102, 104, 106, 108, 110, 112, 114, 116, 118, 120, 122, 124, 126, 128, 130, 132, 134, 136, 138, 140, 142, 144, 146, 148, 150, 152, 154, 156, 158, 160, 162, 164, 166, 168, 170, 172, 174, 176, 178, 180, 182, 184, 186, 188, 190, 192, 194, 196, 198, 200, 202, 204, 206, 208, 210, 212, 214, 216, 218, 220, 222, 224, 226, 228, 230, 232, 234, 436, 438, 440, 442, 444, 446, 448, 450, 452, 454, 456, 458, 460, 462, 464, 466, 468, 470, 472, 474, 476, 478, 480, 482, 484, 486, 488, 490, 492, 494, 496, 498, 500, 502, 504, 506, 508, 510, 512, 514, 516, 518, 520, 522, 524, 526, 528, 530, 532, 534, 536, 538, 540, 542, 544, 546, 548, 550, or any of SEQ ID NO: 235 to 427;
(c) a nucleotide sequence encoding a polypeptide wherein the polypeptide has a percentage identity to at least one of SEQ ID NO: 2, 4, 6, 8, 10, 12, 14, 16, 18, 20, 22, 24, 26, 28, 30, 32, 34, 36, 38, 40, 42, 44, 46, 48, 50, 52, 54, 56, 58, 60, 62, 64, 66, 68, 70, 72, 74, 76, 78, 80, 82, 84, 86, 88, 90, 92, 94, 96, 98, 100, 102, 104, 106, 108, 110, 112, 114, 116, 118, 120, 122, 124, 126, 128, 130, 132, 134, 136, 138, 140, 142, 144, 146, 148, 150, 152, 154, 156, 158, 160, 162, 164, 166, 168, 170, 172, 174, 176, 178, 180, 182, 184, 186, 188, 190, 192, 194, 196, 198, 200, 202, 204, 206, 208, 210, 212, 214, 216, 218, 220, 222, 224, 226, 228, 230, 232, 234, 436, 438, 440, 442, 444, 446, 448, 450, 452, 454, 456, 458, 460, 462, 464, 466, 468, 470, 472, 474, 476, 478, 480, 482, 484, 486, 488, 490, 492, 494, 496, 498, 500, 502, 504, 506, 508, 510, 512, 514, 516, 518, 520, 522, 524, 526, 528, 530, 532, 534, 536, 538, 540, 542, 544, 546, 548, 550, or any of SEQ ID NO: 235 to 427; and
wherein the percentage identity is selected from the group consisting of at least 50%, at least 51%, at least 52%, at least 53%, at least 54%, at least 55%, at least 56%, at least 57%, at least 58%, at least 59%, at least 60%, at least 61%, at least 62%, at least 63%, at least 64%, at least 65%, at least 66%, at least 67%, at least 68%, at least 69%, at least 70%, at least 71%, at least 72%, at least 73%, at least 74%, at least 75%, at least 76%, at least 77%, at least 78%, at least 79%, at least 80%, at least 81%, at least 82%, at least 83%, at least 84%, at least 85%, at least 86%, at least 87%, at least 88%, at least 89%, at least 90%, at least 91%, at least 92%, at least 93%, at least 94%, at least 95%, at least 96%, at least 97%, at least 98%, at least 99% and 100%;
wherein the nucleotide sequence is operably linked to a promoter that is expressed in a plant cell;
wherein the target plant overexpresses the polypeptide and said overexpression results in the target plant expressing the modified trait wherein the modified trait is selected from the group consisting of decreased sensitivity to light, increased yield, greater height, greater stem diameter, greater resistance to lodging, increased branching, increased secondary rooting, greater cold tolerance, greater tolerance to water deprivation, reduced stomatal conductance, altered C/N sensing, increased tolerance to nitrogen limiting conditions, improved late season growth and vigor, greater number of primary nodes, greater late season canopy coverage, increased tolerance to abiotic stress, increased tolerance to hyperosmotic stress, altered levels of ureides, altered levels of hexose sugars, altered SPS activity, altered levels of starch, and delayed senescence, as compared to a control plant that does not comprise the recombinant polynucleotide; and optionally, selecting a transgenic plant having at least one of the modified traits as compared to the control plant.

47. The method of claim 46, wherein the target plant comprises a second recombinant polynucleotide comprising a trans-acting element that controls expression of the polypeptide.

48. The method of claim 46, wherein the target plant expresses a protein encoded by a nucleic acid selected from the group consisting of: SEQ ID NO: 429, SEQ ID NO: 431, SEQ ID NO: 433, and SEQ ID NO: 529.

49. The method of claim 46, wherein the target plant is stably transformed with the at least one recombinant polynucleotide.

50. The method of claim 46, wherein the promoter is a constitutive, inducible, tissue-specific, tissue-enhanced, cell-enhanced, or cell-specific promoter.

The application's sequence listing, which the Patent Office published only in electronic form, follows.

SEQUENCE LISTING (550 sequences)

SEQ ID NO: 1 - DNA, 669 bp, Arabidopsis thaliana
  AtBBX28 (G1481), AT4G27310.1, paralog of AtBBX29 (G900)
atggggaagaagtgtgatttatgtaacggtgttgcaagaatgtattgcgagtcagatcaagctagtttatgttgggattgcgacggtaaagttcacggcgctaatttcttggtagctaaacacacgcgttgtcttctctgtagcgcttgtcagtctcttacgccgtggaaagctactgggcttcgtcttggcccaactttctccgtctgcgagtcatgcgtcgctcttaaaaacgccggcggtggccgtggaaacagagttttatcggagaatcgtggtcaggaggaggttaatagtttcgagtccgaagaagatcggattagagaagatcacggtgacggtgacgacgcggagtcttacgatgatgatgaggaagaagatgaggatgaagagtacagcgacgatgaggatgaggatgatgatgaggatggtgatgatgaggaagcggagaatcaagttgtgccgtggtctgcggcggcgcaagttcctccggtgatgagttcttcatcttctgacggaggaagcggaggttcagtgacgaagaggacgagggctagagagaattcagatcttctctgctccgatgatgagatcggaagctcttcagctcaagggtcaaactattctcggccgttgaagcgatcggcgtttaaatcaacggttgttgtt

SEQ ID NO: 2 - protein, 223 aa, Arabidopsis thaliana
  AtBBX28 (G1481), AT4G27310.1, domain coordinates 5-41, paralog of AtBBX29 (G900)
MGKKCDLCNGVARMYCESDQASLCWDCDGKVHGANFLVAKHTRCLLCSACQSLTPWKATGLRLGPTFSVCESCVALKNAGGGRGNRVLSENRGQEEVNSFESEEDRIREDHGDGDDAESYDDDEEEDEDEEYSDDEDEDDDEDGDDEEAENQVVPWSAAAQVPPVMSSSSSDGGSGGSVTKRTRARENSDLLCSDDEIGSSSAQGSNYSRPLKRSAFKSTVVV

SEQ ID NO: 3 - DNA, 645 bp, Arabidopsis thaliana
  AtBBX29 (G900), AT5G54470.1 paralog of AtBBX28 (G1481)
atggggaagaagaagtgcgagttatgttgtggtgtagcgagaatgtattgtgagtcagatcaagcgagtttatgttgggattgtgacggtaaagttcacggagctaattttctggtggcgaaacacatgcgttgtcttctatgtagcgcgtgtcagtcacacacgccttggaaagcttctgggctgaatcttggcccaactgtttctatctgtgagtcttgtttagctcgtaagaagaataacaacagctccctcgccgggagggatcagaatcttaaccaagaagaagagatcattggttgtaacgacggagctgagtcttatgatgaggaaagcgatgaggatgaagaagaagaagaagtggagaatcaggttgttccggctgcggtggagcaagaacttccggtggtgagttcgtcgtcttcggttagtagtggtgaaggagatcaggtggtgaaaaggacgagacttgatttggatcttaacctctccgatgaggagaaccaatctagaccattgaaaagattatcgagagacgaaggtttgtcaagatcaactgttgtgatgaatagctcaatcgtgaaattacacggagggaggagaaaagcagagggatgtgatacatcatcgtcgtcttcgttttat

SEQ ID NO: 4 - protein, 215 aa, Arabidopsis thaliana
  AtBBX29 (G900), AT5G54470.1, domain coordinates 11-42, paralog of AtBBX28 (G1481)
MGKKKCELCCGVARMYCESDQASLCWDCDGKVHGANFLVAKHMRCLLCSACQSHTPWKASGLNLGPTVSICESCLARKKNNNSSLAGRDQNLNQEEEIIGCNDGAESYDEESDEDEEEEEVENQVVPAAVEQELPVVSSSSSVSSGEGDQVVKRTRLDLDLNLSDEENQSRPLKRLSRDEGLSRSTVVMNSSIVKLHGGRRKAEGCDTSSSSSFY

SEQ ID NO: 5 - DNA, 789 bp, Zea mays
  ACN33981.1, ortholog of AtBBX28 (G1481), AtBBX29 (G900)
atgtcggcggctgcggcagcggaagtggggaaggagaagggcgccgccacccccggccccggccccggccccggtggcgcgtgcgagctgtgcggcgccgcggccagggtgtactgcggcgccgacgaggccacgctctgctggggctgcgacgcgcaggtgcacggcgccaacttcctggtggcgcgccacgcgcgctcgctgctgtgccggggctgcgcgcgccccacgccgtggcgcgccgcgggcccgcgcctcggccccaccgtctccctctgcgtccgctgcgtccgccgcggcccggcgggggccgtgggcgtcggcggcgatgaggagatggggggagcgggcgacggagacgccgaggatgacgacgacgaggacgacgactccgaggaggaggaggaggaggaggaggaggaaggggagggggagaaccaggtcgtgccgtggacggaggacgccgaggccacgccgccgcccgtcgggagctccacgtccagcagcagccgggaggcccccgccaacggcgcagagcgcgcagcgaaggaaaacgccccgtgctccacctcgcagccaggcctgtgccaccacgcgtcgtccgcgcgccacggcggccggagcgacgaggccacctcgtcccggagcggcggccgggtcctcgcctcccgccacaggaagagatcgccctcggatttcttcagctctgatgggtcgccgcagcccgggaatggcacaccggcggcgaggaattgctccgacgccggcattgccaggaatgactttacc

SEQ ID NO: 6 - protein, 263 aa, Zea mays
  ACN33981.1, domain coordinates 32-64, ortholog of AtBBX28 (G1481), AtBBX29 (G900)
MSAAAAAEVGKEKGAATPGPGPGPGGACELCGAAARVYCGADEATLCWGCDAQVHGANFLVARHARSLLCRGCARPTPWRAAGPRLGPTVSLCVRCVRRGPAGAVGVGGDEEMGGAGDGDAEDDDDEDDDSEEEEEEEEEEGEGENQVVPWTEDAEATPPPVGSSTSSSSREAPANGAERAAKENAPCSTSQPGLCHHASSARHGGRSDEATSSRSGGRVLASRHRKRSPSDFFSSDGSPQPGNGTPAARNCSDAGIARNDFT

SEQ ID NO: 7 - DNA, 735 bp, Populus trichocarpa
  Pt_568988, ortholog of AtBBX28 (G1481), AtBBX29 (G900)
atgaaagggtgtgagctttgtgggagttcagcaagaatgttctgtgaatcagacgaagctagtttatgttgggattgtgatgagaaagtacactctgccaactttcttgtagctaaacactgtagaacccttctttgtcaagtctgtcaatctccaactccttggaaagcctcggtgtctaaatttgctcctactgtttccatatgtgaatcttgttttactatccctaacaaaacaaaagaaacagaagagagaatgaaagggtgcgagctttgtgggagttcagcaaggatgtattgtgaatcagaccaagctagtttatgttgggattgtgatgagaaagtgcacactgccaactttcttgttgctaaacattgtagaacccttctttgtcaagtctgtcaatctccaactccttggaaagcctcggggtctaaatttgctcctactgtttccgtggtgccatggtcaggtcctactgcgtcgtcgtcgccatcacctgtgccacctgtggctagttctagtagtgaagaggagacttcttgtgctggtagaaatggattcttgaaacggatgcgagagagtaatgttgatcttgattctgatgatgaaattggatgttcctcttctcataatataggaggtcgaatattgagcaatgatggagggaattctttgagttcaatgaggccatggaagcaagcaagaacaagtgttaatgttgaagaagatggt

SEQ ID NO: 8 - protein, 245 aa, Populus trichocarpa
  Pt_568988, domain coordinates 4-40, 89-125, ortholog of AtBBX28 (G1481), AtBBX29 (G900)
MKGCELCGSSARMFCESDEASLCWDCDEKVHSANFLVAKHCRTLLCQVCQSPTPWKASVSKFAPTVSICESCFTIPNKTKETEERMKGCELCGSSARMYCESDQASLCWDCDEKVHTANFLVAKHCRTLLCQVCQSPTPWKASGSKFAPTVSVVPWSGPTASSSPSPVPPVASSSSEEETSCAGRNGFLKRMRESNVDLDSDDEIGCSSSHNIGGRILSNDGGNSLSSMRPWKQARTSVNVEEDG

SEQ ID NO: 9 - DNA, 285 bp, Populus trichocarpa
  Pt_571834, ortholog of AtBBX28 (G1481), AtBBX29 (G900)
atgaagaagtgtgagctatgcaagaacccagcaagaacatactgtgaatcagacgaagcaaatctttgttggaactgtgatacaaaagtccatggagccaactttcttgttgctagacatgctcgtgctcttctttgtcagtcttgtcaatcgctaactccctggaaagcctctgggtctcaactagggcacactgtgtctgtatgtgagagatgtggtgccatggtcaccaacaacaccacctccaccgccatctgcaagctcttcttgttcttgtaccagttc

SEQ ID NO: 10 - protein, 95 aa, Populus trichocarpa
  Pt_571834, domain coordinates 4-40, ortholog of AtBBX28 (G1481), AtBBX29 (G900)
MKKCELCKNPARTYCESDEANLCWNCDTKVHGANFLVARHARALLCQSCQSLTPWKASGSQLGHTVSVCERCGAMVTNNTTSTAICKLFLFLYQF

SEQ ID NO: 11 - DNA, 1121 bp, Populus trichocarpa
  Pt_582065, ortholog of AtBBX28 (G1481), AtBBX29 (G900)
atgaaagggtgtgagctatgtgggagttcagcaagaatgttctgtgaatcagaccaagctagtttatgttgggattgtgatgagaaagtacactctgccaacttccttgttgcaaagcattgtagaacccttctttgtcaagtgtgtcaatctccaactccttggaaatcctcagggtctaaacttgcccctaccgtttctgtatgtgaatcatgttttgctgtccataaaaataataaaaaacaactccaagatctgaacgtcatggctagtgatcaagaaagccgagaagccggaaatgattatgacgagtctgaaaatgatcgagaattcgacgacgacgacactgatgatgatagtgatgaatatgacgaggaggaagatggagacaaccagtgaagaggagatttcctgtgctggtggaaatgggttcttgaaacggatgcgagacagtaatgttgatcttgattctgatgtaagtctctttttctttttctttcatttctttgccattttttttatattagtttttagagggcacattttaataattgaatttgtggatcttaggaaatattgggtcttcttcctcttcctttttaggttacaaactttgggtttggtgaatacatttaatgttggataaatgcaggatgaaactggatgttcctcttcgcataatttaagaggtggaagcatgagcaccgaggaagggaattctttgagttcatcaaggccatggaagcaagcaagaacaagcgttcatgtagaagaagatggtcatgatggtcaagcaatgtcaagatcatcggctatcatagactccctgaagagactgcagaaagacttggtcgcgaatggagaaaacgcgtctgctgctattcttgggatctgcaaattgagcagagatcagagcctttgatttctgcccccccccccccccctaactttttttatatgattaattagtaaccatctagtttttgaaccataactatttagtatttcattttattttgaagcttgttttagtagctggttgtgtttgtcttcatggttttgtacatgagatggtatttggttcaatggttaatgcaatatattaccttatgctatttgtt

SEQ ID NO: 12 - protein, 132 aa, Populus trichocarpa
  Pt_582065, domain coordinates 4-40, ortholog of AtBBX28 (G1481), AtBBX29 (G900)
MKGCELCGSSARMFCESDQASLCWDCDEKVHSANFLVAKHCRTLLCQVCQSPTPWKSSGSKLAPTVSVCESCFAVHKNNKKQLQDLNVMASDQESREAGNDYDESENDREFDDDDTDDDSDEYDEEEDGDNQ

SEQ ID NO: 13 - DNA, 420 bp, Populus trichocarpa
  Pt_758524, ortholog of AtBBX28 (G1481), AtBBX29 (G900)
atgaaaaagtgtgagctctgtgattcttttgcacaaatgcactgtgaatcggatcaagctatcctgtgttcagcctgtgatgcatatgttcacagtgcaaattttcttgctgcaaaacattcaagaacgcttctttgccatgtttgtcaatctcacacgccctggattggcaccggacccctgttaggtgctactctttcggtttgcaacagctgcataaacaactcgagttgtactgatggaaaaggcagtgagaatgatcaaatcgccaataatgatgatgagataattgcgaacatgatgaaaacgatgatggtggttaagacggcgatgaagacgatgaagaaaatcaaatgtgtttatggattagttaaacaaggcaaagatcgtcaagaagtctctacgcgtcaaatgctattt

SEQ ID NO: 14 - protein, 140 aa, Populus trichocarpa
  Pt_758524, domain coordinates 4-40, ortholog of AtBBX28 (G1481), AtBBX29 (G900)
MKKCELCDSFAQMHCESDQAILCSACDAYVHSANFLAAKHSRTLLCHVCQSHTPWIGTGPLLGATLSVCNSCINNSSCTDGKGSENDQIANNDDEIIANMMKTMMVVKTAMKTMKKIKCVYGLVKQGKDRQEVSTRQMLF

SEQ ID NO: 15 - DNA, 849 bp, Oryza sativa
  Os08g08120.1, ortholog of AtBBX28 (G1481), AtBBX29 (G900)
atgtcggtggcggcggaggggaaggagaagggggttggtggtgggggtggtggtgcgggtgcgggggcgtgcgagctgtgcggggcggcggcgagggtgtactgcggggcggacgaggcgacgctgtgctgggggtgcgacgcgcaggtgcacggggccaacttcctggtggcgcggcacgcgcgggcgctgctgtgccgcgggtgcgcgaggcccacgccgtggcgcgccgcggggcccaggctgggccccaccgcgtcgctctgcgagcgctgcgtccgccgcggcggtggtggccgtggtggtggaggaggtggaggcgctgctggtggtggaggccgtggtggtgggggagacgaggagatgggcggcgagggcgatgaggaggaggaggacgaggacgaggaggtggtcgtcgaggaggaggaggacgaggatgatgaagacgaggagggggagggggagggggagaaccaggtggtgccgtgggcggaggaggcggaggccacgccgccgcccgtcgcgagctccacgtcgagcagcagccgggaggccgccgccaacggcgcgaacgccgccgaccgcgtcaaggaggaccagccgtgctcgacgtcgcagccgagcttgtgccggtacgcgtcctcggctcaccatggcggtggtggccggagcgacgaggccacctcctcccggaacggcggtggcgtcggcggccgattccttgcctcccggcataggaagagatcgccctcggatttccgccggtcggggttggcgcagtcggtgagcggcgtgcaggggaggaattgctccaatgcggtcgttggtcgaaatgatgcaagcatgatg

SEQ ID NO: 16 - protein, 283 aa, Oryza sativa
  Os08g08120.1, domain coordinates 28-60, ortholog of AtBBX28 (G1481), AtBBX29 (G900)
MSVAAEGKEKGVGGGGGGAGAGACELCGAAARVYCGADEATLCWGCDAQVHGANFLVARHARALLCRGCARPTPWRAAGPRLGPTASLCERCVRRGGGGRGGGGGGGAAGGGGRGGGGDEEMGGEGDEEEEDEDEEVVVEEEEDEDDEDEEGEGEGENQVVPWAEEAEATPPPVASSTSSSSREAAANGANAADRVKEDQPCSTSQPSLCRYASSAHHGGGGRSDEATSSRNGGGVGGRFLASRHRKRSPSDFRRSGLAQSVSGVQGRNCSNAVVGRNDASMM

SEQ ID NO: 17 - DNA, 843 bp, Oryza sativa
  Os08g08120.2, ortholog of AtBBX28 (G1481), AtBBX29 (G900)
atgtcggtggcggcggaggggaaggagaagggggttggtggtgggggtggtggtgcgggtgcgggggcgtgcgagctgtgcggggcggcggcgagggtgtactgcggggcggacgaggcgacgctgtgctgggggtgcgacgcgcaggtgcacggggccaacttcctggtggcgcggcacgcgcgggcgctgctgtgccgcgggtgcgcgaggcccacgccgtggcgcgccgcggggcccaggctgggccccaccgcgtcgctctgcgagcgctgcgtccgccgcggcggtggtggccgtggtggtggaggaggtggaggcgctgctggtggtggaggccgtggtggtgggggagacgaggagatgggcggcgagggcgatgaggaggaggaggacgaggacgaggaggtggtcgtcgaggaggaggaggacgaggatgatgaagacgaggagggggagggggagggggagaaccaggtggtgccgtgggcggaggaggcggaggccacgccgccgcccgtcgcgagctccacgtcgagcagcagccgggaggccgccgccaacggcgcgaacgccgccgaccgcgtcaaggaggaccagccgtgctcgacgtcgcagccgagcttgtgccggtacgcgtcctcggctcaccatggcggtggtggccggagcgacgaggccacctcctcccggaacggcggtggcgtcggcggccgattccttgcctcccggcataggaagagatcgccctcggatttccgccggtcggggttggcgcagtcggtgagcggcgtgcaggggaggaattgctccaatgcggtcgttggtcgaaatgacttttcc

SEQ ID NO: 18 - protein, 281 aa, Oryza sativa
  Os08g08120.2, domain coordinates 28-60, ortholog of AtBBX28 (G1481), AtBBX29 (G900)
MSVAAEGKEKGVGGGGGGAGAGACELCGAAARVYCGADEATLCWGCDAQVHGANFLVARHARALLCRGCARPTPWRAAGPRLGPTASLCERCVRRGGGGRGGGGGGGAAGGGGRGGGGDEEMGGEGDEEEEDEDEEVVVEEEEDEDDEDEEGEGEGENQVVPWAEEAEATPPPVASSTSSSSREAAANGANAADRVKEDQPCSTSQPSLCRYASSAHHGGGGRSDEATSSRNGGGVGGRFLASRHRKRSPSDFRRSGLAQSVSGVQGRNCSNAVVGRNDFS

SEQ ID NO: 19 - DNA, 837 bp, Oryza sativa
  Os08g08120.3, ortholog of AtBBX28 (G1481), AtBBX29 (G900)
atgtcggtggcggcggaggggaaggagaagggggttggtggtgggggtggtggtgcgggtgcgggggcgtgcgagctgtgcggggcggcggcgagggtgtactgcggggcggacgaggcgacgctgtgctgggggtgcgacgcgcaggtgcacggggccaacttcctggtggcgcggcacgcgcgggcgctgctgtgccgcgggtgcgcgaggcccacgccgtggcgcgccgcggggcccaggctgggccccaccgcgtcgctctgcgagcgctgcgtccgccgcggcggtggtggccgtggtggtggaggaggtggaggcgctgctggtggtggaggccgtggtggtgggggagacgaggagatgggcggcgagggcgatgaggaggaggaggacgaggacgaggaggtggtcgtcgaggaggaggaggacgaggatgatgaagacgaggagggggagggggagggggagaaccaggtggtgccgtgggcggaggaggcggaggccacgccgccgcccgtcgcgagctccacgtcgagcagcagccgggaggccgccgccaacggcgcgaacgccgccgaccgcgtcaaggaggaccagccgtgctcgacgtcgcagccgagcttgtgccggtacgcgtcctcggctcaccatggcggtggtggccggagcgacgaggccacctcctcccggaacggcggtggcgtcggcggccgattccttgcctcccggcataggaagagatcgccctcggatttccgccggtcggggttggcgcagtcggtgagcggcgtgcaggggaggaattgctccaatgcggtcgttggtcgaaatgag

SEQ ID NO: 20 - protein, 279 aa, Oryza sativa
  Os08g08120.3, domain coordinates 28-60, ortholog of AtBBX28 (G1481), AtBBX29 (G900)
MSVAAEGKEKGVGGGGGGAGAGACELCGAAARVYCGADEATLCWGCDAQVHGANFLVARHARALLCRGCARPTPWRAAGPRLGPTASLCERCVRRGGGGRGGGGGGGAAGGGGRGGGGDEEMGGEGDEEEEDEDEEVVVEEEEDEDDEDEEGEGEGENQVVPWAEEAEATPPPVASSTSSSSREAAANGANAADRVKEDQPCSTSQPSLCRYASSAHHGGGGRSDEATSSRNGGGVGGRFLASRHRKRSPSDFRRSGLAQSVSGVQGRNCSNAVVGRNE

SEQ ID NO: 21 - DNA, 648 bp, Glycine max
  Glyma06g39810.1, ortholog of AtBBX28 (G1481), AtBBX29 (G900)
atggaggaatcatcaacaacatgcgtgttgtgcgagaagagggcaatgatgctctgcgactcggaccaggctaagctatgctgggaatgcgacgagaaagtccacagcgccaatttcttggtcgcgaaacattctagggttcttttatgtcgtttgtgtcactccccgactccgtggaaggcttcggggatgaaactcacgcccactgtgtcgttttgtaaccgctgcgttgcggaacggaacgcgaggtggaaccgattggtgaataatgaaaatgaacatcaacaacagcaacaacaacaacaacagagtgattttgtggtggatgatggtagggaatatggttctgatcatgtttttgatgatgacgatggtgattatagtgatgatagtggtgaagaagaagaagaggacgaggatgatgaagaggagaatgagaatcaagtggttccaatgtcttctggttctgccacgtcaccacctaaggttgcctgtttagcgttgaagcgattgagaaacaactctttttctgtcgattcttcacatgatgagacagcgtgctcttcatctgagatgcttagttctacattgcctagtggtgatgaatcaacctctttgagtagtgtattaaagaggcatcgggttgat

SEQ ID NO: 22 - protein, 216 aa, Glycine max
  Glyma06g39810.1, domain coordinates 15-44, ortholog of AtBBX28 (G1481), AtBBX29 (G900)
MEESSTTCVLCEKRAMMLCDSDQAKLCWECDEKVHSANFLVAKHSRVLLCRLCHSPTPWKASGMKLTPTVSFCNRCVAERNARWNRLVNNENEHQQQQQQQQQSDFVVDDGREYGSDHVFDDDDGDYSDDSGEEEEEDEDDEEENENQVVPMSSGSATSPPKVACLALKRLRNNSFSVDSSHDETACSSSEMLSSTLPSGDESTSLSSVLKRHRVD

SEQ ID NO: 23 - DNA, 531 bp, Glycine max
  Glyma06g45620.1, ortholog of AtBBX28 (G1481), AtBBX29 (G900)
atgaacaagtgcgaactgtgcaaagttccggcgaggatcttctgcgagtcggaccaggcgagcttatgctgggactgcgacgctaaggttcacagcgccaacttcttggtcgcgagacacgcgcgaaccttactctgccgcacgtgccgctctcccacgccgtggaaggcctccggcgcctcactcgccagcgccgtctccgtctgcgaccgctgcgccgcctccgaagaaccggaagagagtgaagccggcaatgacgacgaaccagacacggaggacgacgacaacgacgacgaggacggcgacaatcaggtcgtgccgtggtcctcctccccgccgccgcctccgccgtcgagctcctccggcagcgaatggtcggagtgcaaaaacgacgacgcttctatttccgcctcggaacaggaaacgacaacatgctcgttgaaacgacagcgcgaggacgatgatgatgcttcttccgatcgtgatcccagggtgttgagaagggttgggcgtctcaacggaggttgcgtg

SEQ ID NO: 24 - protein, 177 aa, Glycine max
  Glyma06g45620.1, domain coordinates 4-40, ortholog of AtBBX28 (G1481), AtBBX29 (G900)
MNKCELCKVPARIFCESDQASLCWDCDAKVHSANFLVARHARTLLCRTCRSPTPWKASGASLASAVSVCDRCAASEEPEESEAGNDDEPDTEDDDNDDEDGDNQVVPWSSSPPPPPPSSSSGSEWSECKNDDASISASEQETTTCSLKRQREDDDDASSDRDPRVLRRVGRLNGGCV

SEQ ID NO: 25 - DNA, 1236 bp, Glycine max
  G4015, ortholog of AtBBX28 (G1481), AtBBX29 (G900)
atggaggaatcatcaacaacatgcgtgttgtgcgagaagagggcaatgatgctctgcgactcggaccaggctaagctatgctgggaatgcgacgagaaagtccacagcgccaatttcttggtcgcgaaacattctagggttcttttatgtcgtttgtgtcactccccgactccgtggaaggcttcggggatgaaactcacgcccactgtgtcgttttgtaaccgctgcgttgcggaacggaacgcgaggtggaaccgattggtgaataatgaaaatgaacatcaacaacagcaacaacaacaacaacagagtgattttgtggtggatgatgggagggaatatggttctgatcatgtttttgatgatgacgatggtgattatagtgatgatagtggtgaagaagaagaagaggacgaggatgatgaagaggagaatgagaatcaagtggttccaatgtcttctggttctgccacgtcaccacctaaggttgcctgtttagcgttgaagcgattgagaaacaactcttttctgtcgattcttcacatgatgagacagcgtgctcttcatctgagatgcttagttctacattgcctagtggtgatgaatcaccctctttgaatggaggaatcatcaacaacatgcgtgttgtgcgagaagagggcaatgatgctctgcgactcggaccaggctaagctatgctgggaatgcgacgagaaagtccacagcgccaatttcttggtcgcgaaacattctagggttcttttatgtcgtttgtgtcactccccgactccgtggaaggcttcggggatgaaactcacgcccactgtgtcgttttgtaaccgctgcgttgcggaacggaacgcgaggtggaaccgattggtgaataatgaaaatgaacatcaacaacagcaacaacaacaacaacagagtgattttgtggtggatgatgggagggaatatggttctgatcatgtttttgatgatgacgatggtgattatagtgatgatagtggtgaagaagaagaagaggacgaggatgatgaagaggagaatgagaatcaagtggttccaatgtcttctggttctgccacgtcaccacctaaggttgcctgtttagcgttgaagcgattgagaaacaactcttttctgtcgattcttcacatgatgagacagcgtgctcttcatctgagatgcttagttctacattgcctagtggtgatgaatcaccctctttga

SEQ ID NO: 26 - protein, 205 aa, Glycine max
  G4015, domain coordinates 8-44, ortholog of AtBBX28 (G1481), AtBBX29 (G900)
MEESSTTCVLCEKRAMMLCDSDQAKLCWECDEKVHSANFLVAKHSRVLLCRLCHSPTPWKASGMKLTPTVSFCNRCVAERNARWNRLVNNENEHQQQQQQQQQSDFVVDDGREYGSDHVFDDDDGDYSDDSGEEEEEDEDDEEENENQVVPMSSGSATSPPKVACLALKRLRNNSFLSILHMMRQRALHLRCLVLHCLVVMNHPL

SEQ ID NO: 27 - DNA, 237 bp, Glycine max
  Glyma09g35960.1, ortholog of AtBBX28 (G1481), AtBBX29 (G900)
atgggggaatattcatgcgcgttgtgcaagaagagggcgatgatgctgtgcgactcggaccaggctaagctatgctgggagtgcgacgagaaagttcacagcgcgaatttcttggtggctaagcattcgcgtgtgcttctctgtcgtttatgccattccccgactccgtggaaggcctccggcaccaaactcatgctcacggtgtcgttttgtcagcgttgcgtcgcgcatcgacac

SEQ ID NO: 28 - protein, 79 aa, Glycine max
  Glyma09g35960.1, domain coordinates 13-42, ortholog of AtBBX28 (G1481), AtBBX29 (G900)
MGEYSCALCKKRAMMLCDSDQAKLCWECDEKVHSANFLVAKHSRVLLCRLCHSPTPWKASGTKLMLTVSFCQRCVAHRH

SEQ ID NO: 29 - DNA, 519 bp, Glycine max
  Glyma12g11230.1, ortholog of AtBBX28 (G1481), AtBBX29 (G900)
atgaagaagtgcgaactgtgtaaagttccggcgaggatcttctgcgagtcggaccaggctagcttatgctgggactgcgacgctaaggttcacagcgccaacttcttggtcgcgaggcacgtgcgaaccctactctgccgcacgtgtcgttctcccacgccctggaaggcctccggcgcctcactcgcccacgccgcctccgtctgcgaccgctgcgccgccgcggaagagacggaagagagcgaagccggcaatgacgacgaaccagacaccgaggacgacgacgatgtcgacaaccaggtcgtgccgtggtcctccacgccgccgccgccgccgccgtcgagctcctccggcagcgaatgctcggagtgcaaaaacaacgttgcttctttttccgcctcggaacaggaaacgacaacatcctcgttgaaacgacagcgcgaggacgacgacgatgcttcttccgatcctgatcccagggtgttgagaagggttgggcgtctcaacggaggttgcgtg

SEQ ID NO: 30 - protein, 173 aa, Glycine max
  Glyma12g11230.1, domain coordinates 4-40, ortholog of AtBBX28 (G1481), AtBBX29 (G900)
MKKCELCKVPARIFCESDQASLCWDCDAKVHSANFLVARHVRTLLCRTCRSPTPWKASGASLAHAASVCDRCAAAEETEESEAGNDDEPDTEDDDDVDNQVVPWSSTPPPPPPSSSSGSECSECKNNVASFSASEQETTTSSLKRQREDDDDASSDPDPRVLRRVGRLNGGCV

SEQ ID NO: 31 - DNA, 663 bp, Glycine max
  Glyma12g32470.1, ortholog of AtBBX28 (G1481), AtBBX29 (G900)
atgaagaactgcgagctatgcaagcttccagctaggaccttctgcgagtcggaccaggctagcttatgctgggactgcgacgccaaggtccacggagcgaacttcctcgtcgcgagacacacgcgcacgctcctctgccacgcgtgccagtcactcacgccgtggaaggcctccggctctgccctcggcaacaccgtctcgctgtgccagagttgcgccggcggaaccaccgaacagggcccagagagccaaggagggaatgacgacgacgacatagacaccgacgatgaggatgactacgatgacgatggtgagagcgaggagaacgaggttgcagccgacgaggaggacggagacaaccaggttgtcccttggtcctccgagccgccgccaccgtccccaagctcttccagcagcgaagagtcgattagccggtgcaacaacgtggacgaggtttcgaccacattgaaacgacgtcgcgagaacgacgattttcagggttcgaattcgaataattggaaatgtgaacggagcgaagtggacagaggatgttggttggctcggttgcggcggagaaccgccgatgatgtggcggttgagcgacggagggctagagcggcgtttccgtacggttgttgtgatgatagagcatctgaagacgtt

SEQ ID NO: 32 - protein, 221 aa, Glycine max
  Glyma12g32470.1, domain coordinates 10-40, ortholog of AtBBX28 (G1481), AtBBX29 (G900)
MKNCELCKLPARTFCESDQASLCWDCDAKVHGANFLVARHTRTLLCHACQSLTPWKASGSALGNTVSLCQSCAGGTTEQGPESQGGNDDDDIDTDDEDDYDDDGESEENEVAADEEDGDNQVVPWSSEPPPPSPSSSSSEESISRCNNVDEVSTTLKRRRENDDFQGSNSNNWKCERSEVDRGCWLARLRRRTADDVAVERRRARAAFPYGCCDDRASEDV

SEQ ID NO: 33 - DNA, 462 bp, Glycine max
  G4014, Glyma13g32160.1, ortholog of AtBBX28 (G1481), AtBBX29 (G900)
atgaggaagtgtgagctctgtaacagtcccgcgaagttgttctgcgaatcagatcaagccagcctctgttggaaatgcgatgctaaggttcacagtgcaaacttcctcgtcaccaaacatcccaggattcttctctgccatgtttgtcaatcactaacagcgtggcacggcacaggacccaagtttgtacccaccatgtcagtttgcaacacttgtgtcaacaacaatagtactgagacctgcagccaacagaatcatgaagacgatgatgatgatggtacgggagaggatcatgcagaaaacgacgatggtggtgtggctgaagatgatgatgatgatgatgatgaagaaaatcaagtggttccatggacatctacaccaccacccccagcttccacttcttcaaatagtgttacaactagttctaccaggttctctgatgttgaagaaggtggctccgat

SEQ ID NO: 34 - protein, 154 aa, Glycine max
  G4014, Glyma13g32160.1, domain coordinates 4-40, ortholog of AtBBX28 (G1481), AtBBX29 (G900)
MRKCELCNSPAKLFCESDQASLCWKCDAKVHSANFLVTKHPRILLCHVCQSLTAWHGTGPKFVPTMSVCNTCVNNNSTETCSQQNHEDDDDDGTGEDHAENDDGGVAEDDDDDDDEENQVVPWTSTPPPPASTSSNSVTTSSTRFSDVEEGGSD

SEQ ID NO: 35 - DNA, 663 bp, Glycine max
  G4016, Glyma13g37970.1, ortholog of AtBBX28 (G1481), AtBBX29 (G900)
atgaagaactgcgagttgtgcaagcttccggctcggactttctgcgagtcggaccaggctagcttatgctgggactgcgacgccaaggttcatggagccaacttcctcgtggaaagacacacgcgcacgctcctctgccacgcgtgccagtcgcccacgccgtggaaggcctccggcgccgccctcggaaacaccgtctcgctgtgcgagagatgcgccggcggaaccaccgaacaaggtcaagagagccaaggaggcaatgacgacgacatagacaccgacatagacaccgacgatgaggatgactacgatgagagcgaggacgaggttgccgccgacgaggaggacggagacaaccaggttgtcccttggtcctccgagccgccgccaccagccccgagctcttccagcagcgaagaatcggttagccggtgcaacaacgtggacgaggtttcgaccacattgaaacgccgtcgccaggaggacaatgattttcagggttggaattcgaataattggggatgtgaacggagcgaagtggagagaggaggttggttggttcggttgcggcggagaaccgccgatgatgtggcggttgagcaacggagtgctagagcggcgtctccagacggttgctgtggtgatagagcatctgaagacgtt

SEQ ID NO: 36 - protein, 221 aa, Glycine max
  G4016, Glyma13g37970.1, domain coordinates 10-40, ortholog of AtBBX28 (G1481), AtBBX29 (G900)
MKNCELCKLPARTFCESDQASLCWDCDAKVHGANFLVERHTRTLLCHACQSPTPWKASGAALGNTVSLCERCAGGTTEQGQESQGGNDDDIDTDIDTDDEDDYDESEDEVAADEEDGDNQVVPWSSEPPPPAPSSSSSEESVSRCNNVDEVSTTLKRRRQEDNDFQGWNSNNWGCERSEVERGGWLVRLRRRTADDVAVEQRSARAASPDGCCGDRASEDV

SEQ ID NO: 37 - DNA, 456 bp, Glycine max
  Glyma15g07140.1, ortholog of AtBBX28 (G1481), AtBBX29 (G900)
atgaggaagtgtgaactctgtaatagtcccgcaaagttgttctgtgaatcagatcaagccagcctctgttgggaatgcgatgctaaggttcacagtgcaaacttcctcgtcaccaaacatcccaggattcttctctgccatgtttgtcaatcactaacggcctggcacggcacgggacccaagtttgtacccaccatgtccgtttgcaacacttgtgtcaacaacaatagtgagacctgcagccaacagaatcatgttgaggaccacgacgacaatcatgatgatggcacgggagaggatcatgtagaaaaccatgatggtggtgtgtctgaagatgatgaagaaaatcaagttgttccatggacatctacaccaccacccccagcttccacttcttcaaatagtgttacaactagttctaccaggttctctaatgttgaagaaggtggctccgat

SEQ ID NO: 38 - protein, 152 aa, Glycine max
  Glyma15g07140.1, domain coordinates 4-40, ortholog of AtBBX28 (G1481), AtBBX29 (G900)
MRKCELCNSPAKLFCESDQASLCWECDAKVHSANFLVTKHPRILLCHVCQSLTAWHGTGPKFVPTMSVCNTCVNNNSETCSQQNHVEDHDDNHDDGTGEDHVENHDGGVSEDDEENQVVPWTSTPPPPASTSSNSVTTSSTRFSNVEEGGSD

SEQ ID NO: 39 - DNA, 351 bp, Arabidopsis thaliana
  AtBBX30 (G1478), AT4G15248.1, paralog of AtBBX31 (G1929)
atgtgtagagggtttgagaaagaagaagagagaagaagcgacaatggaggatgccaaagactatgcacggagagtcacaaagctccggtaagctgtgagctttgcggcgagaacgccaccgtgtattgtgaggcagacgcagctttcctttgtaggaaatgcgatcgatgggtccattctgctaattttctagctcggagacatctccggcgcgtgatctgcacgacctgtcggaagctaactcgtcgatgtcttgtcggtgataattttaatgttgttttaccggagataaggatgatagcaaggattgaagaacatagtagtgatcacaaaattccctttgtgtttctc

SEQ ID NO: 40 - protein, 117 aa, Arabidopsis thaliana
  AtBBX30 (G1478), AT4G15248.1, domain coordinates 39-68, paralog of AtBBX31 (G1929)
MCRGFEKEEERRSDNGGCQRLCTESHKAPVSCELCGENATVYCEADAAFLCRKCDRWVHSANFLARRHLRRVICTTCRKLTRRCLVGDNFNVVLPEIRMIARIEEHSSDHKIPFVFL

SEQ ID NO: 41 - DNA, 366 bp, Arabidopsis thaliana
  AtBBX31 (G1929), paralog of AtBBX30 (G1478)
atgtgtagaggcttgaataatgaagagagcagaagaagtgacggaggaggttgccggagtctctgcacgagaccgagtgttccggtaaggtgtgagctttgcgacggagacgcctccgtgttctgtgaagcggactcggcgttcctctgtagaaaatgtgaccggtgggttcatggagcgaattttctagcttggagacacgtaaggcgcgtgctatgcacttcttgtcagaaactcacgcgccggtgcctcgtcggagatcatgacttccacgttgttttaccgtcggtgacgacggtcggagaaaccaccgtggagaatagaagtgaacaagataatcatgaggttccgtttgtttttctctga

SEQ ID NO: 42 - protein, 121 aa, Arabidopsis thaliana
  AtBBX31 (G1929), paralog of AtBBX30 (G1478)
MCRGLNNEESRRSDGGGCRSLCTRPSVPVRCELCDGDASVFCEADSAFLCRKCDRWVHGANFLAWRHVRRVLCTSCQKLTRRCLVGDHDFHVVLPSVTTVGETTVENRSEQDNHEVPFVFL

SEQ ID NO: 43 - DNA, 878 bp, Populus trichocarpa
  Pt_562313, ortholog of AtBBX30 (G1478), AtBBX31 (G1929)
atgtgtaggggtattcatcaggagagaaataaccaaggcggttcttgtggcgaagaggtggtttcatctaaggcaacctcaagattggtttgttgtgagctgtgtggatcaagggcatcattatattgtcaagcagatgatgcatttttatgtcaaaaatgtgacaaatgggtgcatggagcaaatttcctagctcaaaggcatgttagatgcatgctatgcaacacatgccaaaatcttacacaaagatatctcataggggcttcaactgagttgttgcttccaactattgtgagttggagagaaagaaggcagtgcaattctaatcttgaaaagaagagctctggatcacttaaaatgccctttttgtttctttgattctgcttctctctttcaccttttctgtcccttttttcttcccttttttttagttttctggtgctgttcaaggattttttttcttgagatttattgatggagagaacacaaaactgtcacttgaagggttttgggtgcatatgagaattgttgcaagtgggtgataaaattgatcagtcaatttttctgttatatgcaccaccatatatatccaagaaaatacagagaccatagcagctgcttggaatcctggaaaaggaagagaggagaaaaacacagacagaaagatgggtgatgaaatagaggataccctggaatcattgtctccatgaaatcctctgaaagagatcaaattaaatcagaaaatgtattttttttttctctggaaattttctaattttatcacctcttttttgtccaaagtaatgtttttctggtgtgtgtacttttctttttggttataaatagtgtgtaatcatttagatcaaaaggtaagggaa

SEQ ID NO: 44 - protein, 125 aa, Populus trichocarpa
  Pt_562313, domain coordinates 32-68, ortholog of AtBBX30 (G1478), AtBBX31 (G1929)
MCRGIHQERNNQGGSCGEEVVSSKATSRLVCCELCGSRASLYCQADDAFLCQKCDKWVHGANFLAQRHVRCMLCNTCQNLTQRYLIGASTELLLPTIVSWRERRQCNSNLEKKSSGSLKMPFLFL

SEQ ID NO: 45 - DNA, 372 bp, Populus trichocarpa
  Pt_594447, ortholog of AtBBX30 (G1478), AtBBX31 (G1929)
atgtgtagaggtaatcaggagagaagtaaccaaggcagttcttgtaacaaggaggctgtttcacctaatgcaacctcaagattcgtttgttgtgagctatgtggctcgagggcaacattgtattgtcaagcagatcatgcatttctatgtcaaaaatgtgacggatgggtgcatggagctaatttcttagccctcaggcatgttagaaacatgttatgcaacacatgccaaaatcttacacagagatgtctcattggggcttcaactgaggtgatgctttcaactattgtgagttggagagaaagaagggatcgtaattctaatcttgaaaagaagtgctctggatcacttaaaaagcccttttcgtttctt

SEQ ID NO: 46 - protein, 124 aa, Populus trichocarpa
  Pt_594447, domain coordinates 31-67, ortholog of AtBBX30 (G1478), AtBBX31 (G1929)
MCRGNQERSNQGSSCNKEAVSPNATSRFVCCELCGSRATLYCQADHAFLCQKCDGWVHGANFLALRHVRNMLCNTCQNLTQRCLIGASTEVMLSTIVSWRERRDRNSNLEKKCSGSLKKPFSFL

SEQ ID NO: 47 - DNA, 372 bp, Glycine max
  Glyma12g32230.1, ortholog of AtBBX30 (G1478), AtBBX31 (G1929)
atgtgcaaaggtgcagaaggagaaaagcaacatggtttctgcagcagctttctacataaagagagtgcaaccagaagtgctatatgttgtgagctatgtgggttacaggcttcattgtattgccaagctgatgatgcctacttgtgtaaaaaatgcgataaacgggttcatgaagctaattttttggcccttaggcacattaggtgctttctgtgcaacacatgtcagaaccttacgcgaagatatctcattggagcatcactagaggtggttcttccggccaatataaactggaccattagaaatctccttaacaacagaggaatctacagaaagtgttcaagaatgcataacagcccttccctcttttta

SEQ ID NO: 48 - protein, 124 aa, Glycine max
  Glyma12g32230.1, domain coordinates 30-66, ortholog of AtBBX30 (G1478), AtBBX31 (G1929)
MCKGAEGEKQHGFCSSFLHKESATRSAICCELCGLQASLYCQADDAYLCKKCDKRVHEANFLALRHIRCFLCNTCQNLTRRYLIGASLEVVLPANINWTIRNLLNNRGIYRKCSRMHNSPSLFL

SEQ ID NO: 49 - DNA, 372 bp, Glycine max
  G4019, Glyma13g38240.1, ortholog of AtBBX30 (G1478), AtBBX31 (G1929)
atgtgcaaaggtgcagaaggagaaaagcaacatggtttctgcagcagctatctacataaagaatgtgcaaccagaagtgctacatgttgtgagctatgtgggttacaggcttcattgtattgtcaagctgatgatgcatacttgtgtagaaaatgtgataaaagggttcatgaagctaattttttggcccttaggcacattaggtgctttctgtgcaacacatgtcaaaaccttacgcgaagatatctcattggagcatcaatagaggtggttcttccagccaacattaactggaccattggaaatctccctagcaacagaggaatccacagaaagtgctcaagaatgcataacaacctttccctcttgtta

SEQ ID NO: 50 - protein, 124 aa, Glycine max
  G4019, Glyma13g38240.1, domain coordinates 30-66, ortholog of AtBBX30 (G1478), AtBBX31 (G1929)
MCKGAEGEKQHGFCSSYLHKECATRSATCCELCGLQASLYCQADDAYLCRKCDKRVHEANFLALRHIRCFLCNTCQNLTRRYLIGASIEVVLPANINWTIGNLPSNRGIHRKCSRMHNNLSLLL

SEQ ID NO: 51 - DNA, 753 bp, Arabidopsis thaliana
  AtBBX26 (G1486), AT1G60250.1, ortholog of AtBBX26 (G1486)
atggctcaagtttgtcacacatgtagacatgtaacagccgtgatccattgtgttacagaagctcttaacttctgccttacatgtgacaaccttcgccatcataataacatacatgcagaacacgtacgttaccaactttgcgataactgctcgatgtatccgtctatacttttctgttatgaggacgggatggttctttgtcaatcatgttattcgcaccattacaattgtgccactaatggccatcaaactcaagtcgtcttcgctaacatgaataatcaacaccatgatcatgcacatatgcctcatgtggttcaccataacaataacaataatcatcagcagcagcatgtgggtggtcaccaaagaagagcagagatgtttgagaggagctgccacggggataacaattgcgagagatggatgtttgcaatgagatgtgagttatgcgtagcttcgaattcaaatgctgttgtttattgtcctacacacaaccagattctatgcgatagttgcgaccggatgattcacagtcacgaggacgcggtgccgccgcattcgaggtgtaagctttgcgtaatctgcaagagaccttctcgccgttttctcattggcggctatcagtttaatttcccaccggttcatcctcctgcggcagaggggattccagttacgcccccaacagaactacctcaacaagatattaattatgattatctagatgatgttgatgatttttcttggtttggtagg

SEQ ID NO: 52 - protein, 251 aa, Arabidopsis thaliana
  AtBBX26 (G1486), AT1G60250.1, domain coordinates 5-36, 47-77
MAQVCHTCRHVTAVIHCVTEALNFCLTCDNLRHHNNIHAEHVRYQLCDNCSMYPSILFCYEDGMVLCQSCYSHHYNCATNGHQTQVVFANMNNQHHDHAHMPHVVHHNNNNNHQQQHVGGHQRRAEMFERSCHGDNNCERWMFAMRCELCVASNSNAVVYCPTHNQILCDSCDRMIHSHEDAVPPHSRCKLCVICKRPSRRFLIGGYQFNFPPVHPPAAEGIPVTPPTELPQQDINYDYLDDVDDFSWFGR

SEQ ID NO: 53 - DNA, 726 bp, Arabidopsis thaliana
  AtBBX20 (G1888), AT4G39070.1, paralog of AtBBX21 (G1482)
atgaagatttggtgtgctgtttgtgataaagaagaagcttcggtgttttgttgtgcggatgaagcagctctttgtaatggttgcgatcgccatgttcatttcgccaataaactagccgggaaacatctccggttctctctcacttctcctactttcaaagatgctcctctttgtgatatttgcggggagaggcgtgcattattattttgccaagaagacagagcaatactatgcagagaatgtgacattccaatacatcaagctaatgagcacactaagaaacacaatagattcctccttaccggcgttaagatctctgcctccccgtcagcctacccaagagcctccaattccaactctgctgctgcatttggtcgagccaaaacccgaccaaaatcagtatcgagcgaggtcccgagctcggcctccaatgaggtatttacgagctcttcttcgacgaccacgagcaattgctattatgggatagaagaaaactaccatcacgtgagcgattcggggtcgggatcgggttgtacaggtagtatatccgagtatttgatggagacattaccgggttggagagtggaggatttgcttgaacacccttcttgtgtctcctatgaggataacattattactaataacaataacagtgagtcttatagggtttatgatggttcttcacaattccatcatcaagggttttgggatcacaaacccttctct

SEQ ID NO: 54 - protein, 242 aa, Arabidopsis thaliana
  AtBBX20 (G1888), AT4G39070.1, domain coordinates 5-42, 58-95, paralog of AtBBX21 (G1482)
MKIWCAVCDKEEASVFCCADEAALCNGCDRHVHFANKLAGKHLRFSLTSPTFKDAPLCDICGERRALLFCQEDRAILCRECDIPIHQANEHTKKHNRFLLTGVKISASPSAYPRASNSNSAAAFGRAKTRPKSVSSEVPSSASNEVFTSSSSTTTSNCYYGIEENYHHVSDSGSGSGCTGSISEYLMETLPGWRVEDLLEHPSCVSYEDNIITNNNNSESYRVYDGSSQFHHQGFWDHKPFS

SEQ ID NO: 55 - DNA, 993 bp, Arabidopsis thaliana
  AtBBX21 (G1482), AT1G75540.1, paralog of AtBBX20 (G1888)
atgaagatcaggtgcgacgtctgcgataaagaagaagcgtcggtgttttgcacggccgacgaagcatctctctgcggcggctgcgaccaccaagtccaccacgctaacaaactcgcctctaaacatctccgtttctctctcctttatccttcttcttccaacacctcctctcctctctgcgacatctgtcaggataaaaaagctctgttgttctgtcaacaagatagagctattttatgcaaagattgcgattcatcgatccacgctgcgaacgaacacacaaagaaacacgataggtttcttcttacaggggttaagctctctgcaacatcgtctgtttacaaacctacttcgaaatcttcttcttcttcttcaagcaaccaagatttctctgtccctggatcatcaatctctaatcctcctcctctcaagaaacctctctcagctcctcctcagagcaacaagatccaacccttttcgaagatcaacggcggtgatgcgtcggtgaatcagtggggatccacaagcacgatttctgagtatttgatggatacgttacctggttggcacgttgaggatttcctcgattcctctcttcctacttatggtttctctaagagtggtgatgatgatggagtgttaccatatatggaaccagaagatgacaacaacactaagagaaacaacaacaacaacaacaacaacaacaacaatacagtgtcacttccatctaagaatttagggatttgggtccctcagattccacaaactcttccttcttcatacccaaatcaatacttttctcaagacaacaacatacagtttgggatgtacaacaaagaaacatcaccagaagtagtgtcttttgctccaatacaaaacatgaaacaacaaggacagaacaacaagagatggtatgatgatggtggcttcactgtcccacagatcactcctcctcctctttcttctaataaaaagtttagatctttctgg

SEQ ID NO: 56 - protein, 331 aa, Arabidopsis thaliana
  AtBBX21 (G1482), AT1G75540.1, domain coordinates 5-42, 60-97, paralog of AtBBX20 (G1888)
MKIRCDVCDKEEASVFCTADEASLCGGCDHQVHHANKLASKHLRFSLLYPSSSNTSSPLCDICQDKKALLFCQQDRAILCKDCDSSIHAANEHTKKHDRFLLTGVKLSATSSVYKPTSKSSSSSSSNQDFSVPGSSISNPPPLKKPLSAPPQSNKIQPFSKINGGDASVNQWGSTSTISEYLMDTLPGWHVEDFLDSSLPTYGFSKSGDDDGVLPYMEPEDDNNTKRNNNNNNNNNNNTVSLPSKNLGIWVPQIPQTLPSSYPNQYFSQDNNIQFGMYNKETSPEVVSFAPIQNMKQQGQNNKRWYDDGGFTVPQITPPPLSSNKKFRSFW

SEQ ID NO: 57 - DNA, 768 bp, Zea mays
  ACG44133.1, ortholog of AtBBX20 (G1888), AtBBX21 (G1482), AtBBX21 (G1482)
atgaaggtgcagtgcgacgtgtgcgcggccgaggcggcctccgtcttctgctgcgccgacgaggccgcgctgtgcgacgcgtgcgacgaccgcgtccaccgcgccaacaagctcgcggggaagcaccgccgcttctccctcctccacccctgttcgtcctctgcgcagaagccgccgctctgcgacatctgccaggagcggagaggcttcttgttctgcaaggaggacagggcgatcctgtgccgggagtgcgacgcgccggtgcacagcgcgaacgacatgacgaggcggcacagccggttcctgctcaccggcgtgcgcctctcgtcagcgccggtggactctgctgacccatcagaaggggaggaggaggaggagcaggagaacagcagcaggcccggcaacggcgagtcctgcagcggcggcgccggcgccggcgcgaccacggcgaccgccagcgacgggagcagcatctccgagtacctgaccaagaccctgcccgggtggcacgtcgaggacttcctcgttgacgacgcgtacgccagcgacgtcggcgcctgctcagacggcctttatcagggacaagatggacagatcagcggggtgctgcaagaagcttacatgccgtggacggggcgggagctggtgccctctgacgtcgcagacgagcgggacaactgggagcggtgggtgccgcagatgcacgcggagttcgccggcgacagcaagcggcccagagcgtcgccttcgcctccctgttcgtactgg

SEQ ID NO: 58 - protein, 256 aa, Zea mays
  ACG44133.1, domain coordinates 5-42, 61-98, ortholog of AtBBX20 (G1888), AtBBX21 (G1482), AtBBX21 (G1482)
MKVQCDVCAAEAASVFCCADEAALCDACDDRVHRANKLAGKHRRFSLLHPCSSSAQKPPLCDICQERRGFLFCKEDRAILCRECDAPVHSANDMTRRHSRFLLTGVRLSSAPVDSADPSEGEEEEEQENSSRPGNGESCSGGAGAGATTATASDGSSISEYLTKTLPGWHVEDFLVDDAYASDVGACSDGLYQGQDGQISGVLQEAYMPWTGRELVPSDVADERDNWERWVPQMHAEFAGDSKRPRASPSPPCSYW

SEQ ID NO: 59 - DNA, 630 bp, Zea mays
  CAW36814.1, ortholog of AtBBX20 (G1888), AtBBX21 (G1482), AtBBX21 (G1482)
atgaaggtgcagtgcgacgtgtgcgcggccgaggcggcctccgtcttctgctgtgccgacgaggccgcgctgtgcgacgcgtgcgacgaccgcgtccaccgcgccaacaagctcgcggggaagcaccgccgcttctccctcctccacccctgttcgtcctctgcgcacaagccgccgctctgcgacatctgccaggagcggagaggcttcttgttctgcaaggaggacagggcgatcctgtgccgggagtgcgacgcgccggtgcacagcgcgaacgacatgacgaggcggcacagccggttcctgctcaccggcgtgcgcctctcgtcggcgccggtggactctgctgacccatcagaaggggaggaggaggaggagcaggagaacagcagcaggcccggcaacggtgagtcctgcagcggcggcgccggcgctaccacggcgaccgctagcgacgggagcagcatctccgagtacctgaccaagaccctgcccgggtggcacgtcgaggatttcctcgttgacgacgcgtacgccagcgacgtcggcgcctgctcatcagacgggctttatcaggtcagttcagttcttccatgcgaatggaactgcaagctttcactgaggcgttcc

SEQ ID NO: 60 - protein, 210 aa, Zea mays
  CAW36814.1, domain coordinates 5-42, 61-98, ortholog of AtBBX20 (G1888), AtBBX21 (G1482), AtBBX21 (G1482)
MKVQCDVCAAEAASVFCCADEAALCDACDDRVHRANKLAGKHRRFSLLHPCSSSAHKPPLCDICQERRGFLFCKEDRAILCRECDAPVHSANDMTRRHSRFLLTGVRLSSAPVDSADPSEGEEEEEQENSSRPGNGESCSGGAGATTATASDGSSISEYLTKTLPGWHVEDFLVDDAYASDVGACSSDGLYQVSSVLPCEWNCKLSLRRS

SEQ ID NO: 61 - DNA, 630 bp, Zea mays; identical to SEQ ID NO: 59
  CAW39070.1, ortholog of AtBBX20 (G1888), AtBBX21 (G1482)

SEQ ID NO: 62 - protein, 210 aa, Zea mays; identical to SEQ ID NO: 60
  CAW39070.1, domain coordinates 5-42, 61-98, ortholog of AtBBX20 (G1888), AtBBX21 (G1482)

SEQ ID NO: 63 - DNA, 630 bp, Zea mays; identical to SEQ ID NO: 59
  CAW54447.1, ortholog of AtBBX20 (G1888), AtBBX21 (G1482)

SEQ ID NO: 64 - protein, 210 aa, Zea mays; identical to SEQ ID NO: 60
  CAW54447.1, domain coordinates 5-42, 61-98, ortholog of AtBBX20 (G1888), AtBBX21 (G1482)

SEQ ID NO: 65 - DNA, 630 bp, Zea mays; identical to SEQ ID NO: 59
  CAW74338.1, ortholog of AtBBX20 (G1888), AtBBX21 (G1482)

SEQ ID NO: 66 - protein, 210 aa, Zea mays; identical to SEQ ID NO: 60
  CAW74338.1, domain coordinates 5-42, 61-98, ortholog of AtBBX20 (G1888), AtBBX21 (G1482)

SEQ ID NO: 67 - DNA, 582 bp, Populus trichocarpa
  Pt_195637, ortholog of AtBBX20 (G1888), AtBBX21 (G1482)
atgaagatccggtgtgatgtgtgtgacaatgtagaggcgacagttttctgttgtgcggatgaagctgctctctgcgatggatgtgatcacagagttcaccatgcaaacaagttagcaagcaaacactcgaggttctctttagtccatccttctttcaaagaatcccctctctgtgatatctgtcaggagaggagagcccttctgttttgtcaagaggatagggcaattctatgcagagaatgtgaccttccaattcacaaagctaatgaacatactcagaaacacaacaggtttcttctcacaggtgtaaagctctctgcttcttcttctctgcacacagcatcatcgacctccactaataactttgactcaaacattaacactactagcaatagaaaccatcagccatacctaaagaattccaacgaaatcctcagctctccttcagttgagacagcatcagcaacaacggcatataatttcgaagaaaatcatgttagtgacaatggttcaatttcaacaagtagcatatctgagtatttagagacagtaccaggctggcgcatcgatgattttcttgat

SEQ ID NO: 68 - protein, 194 aa, Populus trichocarpa
  Pt_195637, domain coordinates 5-42, 58-95, ortholog of AtBBX20 (G1888), AtBBX21 (G1482)
MKIRCDVCDNVEATVFCCADEAALCDGCDHRVHHANKLASKHSRFSLVHPSFKESPLCDICQERRALLFCQEDRAILCRECDLPIHKANEHTQKHNRFLLTGVKLSASSSLHTASSTSTNNFDSNINTTSNRNHQPYLKNSNEILSSPSVETASATTAYNFEENHVSDNGSISTSSISEYLETVPGWRIDDFLD

SEQ ID NO: 69 - DNA, 930 bp, Populus trichocarpa
  Pt_550941, ortholog of AtBBX20 (G1888), AtBBX21 (G1482)
atgaagatccagtgcgatgtgtgtaacaaagaagaggcatcggtgttttgcaccgctgacgaggcagctctttgcgacacctgtgaccaccgtgttcaccatgccaacaagcttgcttcaaagcaccaacgtttttcccttctccatccttcctcaaaaaacttccccatctgtgatatctgccaggagaaacgggctttcttgttctgtcaacaagacagggcgattttatgtagagagtgtgatggtccaatacacacagcaaacgagcatacccagaagcacaacaggtttcttctcacaggagtcaagctctctgctacatctgctgtttatatatcttcttcctctgtcaccaacagtggtggtgatctcgttcctgattcaaagtctcaacagcagcagcagcagcagcaatcaatcaagaaacctgtgtttgatgctccagtgaattccaatccacctacagttcccagtaccttatctacaaacacagaagtaaacaagggtggggataatttggtaacaaatgaagggtttggttcaacaacaagtagtactatatcagagtacttgatggagactcttcctggctggcatgttgaagactttcttgattcctctactactccctttggtttctgtaagattgatgatggtctattgccgtttatggatgctcatgatcttgagagcaacatgagttctttctcatcagaaagtttggggctttgggtccctcaagcaccatctactccatacacatctcaacagtattattatccacagttggtagggcaaagtgggttcaaggagataaaagagaccacaaacatgaaagctaacagaaggttggcagatgatgtcttcactgttccacagatcagcctcccggccaatataagctctaagagatctaggcccttatgg

SEQ ID NO: 70 - protein, 310 aa, Populus trichocarpa
  Pt_550941, domain coordinates 5-42, 58-95, ortholog of AtBBX20 (G1888), AtBBX21 (G1482)
MKIQCDVCNKEEASVFCTADEAALCDTCDHRVHHANKLASKHQRFSLLHPSSKNFPICDICQEKRAFLFCQQDRAILCRECDGPIHTANEHTQKHNRFLLTGVKLSATSAVYISSSSVTNSGGDLVPDSKSQQQQQQQQSIKKPVFDAPVNSNPPTVPSTLSTNTEVNKGGDNLVTNEGFGSTTSSTISEYLMETLPGWHVEDFLDSSTTPFGFCKIDDGLLPFMDAHDLESNMSSFSSESLGLWVPQAPSTPYTSQQYYYPQLVGQSGFKEIKETTNMKANRRLADDVFTVPQISLPANISSKRSRPLW

SEQ ID NO: 71 - DNA, 849 bp, Populus trichocarpa
  Pt_801530, ortholog of AtBBX20 (G1888), AtBBX21 (G1482)
atgaagatccagtgtgacgtttgtagcaaagaagaggcctcggtgttttgcaccgctgacgaggcagccctttgtgacacttgtgaccaccgtgtccatcatgccaacaagcttgcttcaaagcatcagcgtttttcccttctccatccttcctcaaaaaacttccccatctgtgatatctgccaggacaaacgggctttcttgttctgtcaacaagacagggcgattttatgcagagattgtgacggtccaatacacacagcaaacgagcatacccagaagcataataggtttcttctcacaggagtcaagctctctgctacatctgctgtttatatgtcttcctcttcctccgttaccatgaattccaatccacctgcagttcccagtaccttgtcagcaaacacagtaataaacaaggacggggataatttggtaacaagtgaagggtttggttcgacaacaagtagtactatatcagagtacttgatggagactcttcctggctggcatgttgaagaatttcttgattcctcttccaccactccatttggtttcagtaagattgatgatggtctcttgccgtatatggacactcatgatcttgaacgcaatatgagttctttctcgtcagaaagtttggggctttgggtcccccaagcaccaactcctcctctatgcacatctcaacaatattactatccacaattggtagggcagagtggattcaaggagacaaaagagagcacaaacatgaaagctaacagaaggttaacagatgatgccttcactgttccacagataagccctccatcaaatattggctccaagagatctaggcccttgtgg

SEQ ID NO: 72 - protein, 283 aa, Populus trichocarpa
  Pt_801530, domain coordinates 5-42, 58-95, ortholog of AtBBX20 (G1888), AtBBX21 (G1482)
MKIQCDVCSKEEASVFCTADEAALCDTCDHRVHHANKLASKHQRFSLLHPSSKNFPICDICQDKRAFLFCQQDRAILCRDCDGPIHTANEHTQKHNRFLLTGVKLSATSAVYMSSSSSVTMNSNPPAVPSTLSANTVINKDGDNLVTSEGFGSTTSSTISEYLMETLPGWHVEEFLDSSSTTPFGFSKIDDGLLPYMDTHDLERNMSSFSSESLGLWVPQAPTPPLCTSQQYYYPQLVGQSGFKETKESTNMKANRRLTDDAFTVPQISPPSNIGSKRSRPLW

SEQ ID NO: 73 - DNA, 645 bp, Populus trichocarpa
  Pt_804174, ortholog of AtBBX20 (G1888), AtBBX21 (G1482)
atgaagatccggtgtgatgtgtgtgacaaggtagaggccacagttttttgttgtgcagatgaagctgctctctgtgatggatgtgatcacagagttcaccatgcaaacacgctagcaagcaaacactcaaggttctctttagtccatccttccttcaaagaatcccctctttgtgatatctgccaggagaggagagccgttctgttttgtcaagaggatagagcaattctatgcagagaatgtgaccttccaattcacaaagttaatgaacatacccagaaacacaataggtttcttctcacaggtgtaaagctctgtggtccttctctgtacgcaacatcatcctccgctagtaactgtgatgcaaacattaacactactagaaatagaaaccatcagcactacctgaagaaaccgatttcagcttccaatgaaatcttcagttctccttcagtagcgacagcgtcgccaccaacagcatatagttatgacgataatcatgttagtggcggtggttcagtttcaacaagtagcatatctgagtatttagagacggtagtaccagggtggcgcgtggatgattttcttgatccttcattcactagcaataatagtttcagcaagggttggaatgcaccctatata

SEQ ID NO: 74 - protein, 215 aa, Populus trichocarpa
  Pt_804174, domain coordinates 5-42, 58-95, ortholog of AtBBX20 (G1888), AtBBX21 (G1482)
MKIRCDVCDKVEATVFCCADEAALCDGCDHRVHHANTLASKHSRFSLVHPSFKESPLCDICQERRAVLFCQEDRAILCRECDLPIHKVNEHTQKHNRFLLTGVKLCGPSLYATSSSASNCDANINTTRNRNHQHYLKKPISASNEIFSSPSVATASPPTAYSYDDNHVSGGGSVSTSSISEYLETVVPGWRVDDFLDPSFTSNNSFSKGWNAPYI

SEQ ID NO: 75 - DNA, 807 bp, Oryza sativa
  Os02g43170.1, ortholog of AtBBX20 (G1888), AtBBX21 (G1482)
atgaaggtgcagtgcgacgtgtgcgcggccgaggcggcgtcggtgttctgctgcgccgacgaggccgcgctgtgcgacgcgtgcgaccaccgggtgcaccgggccaacaagctcgccgggaagcaccgccggttctcgctgctcaacccctcggcgtccggccgctcgccgacatcgacgacggcgccgctctgcgacatctgccaggagaagaggggtttcctgttctgcaaggaggaccgggcgatcctgtgccgcgagtgcgacgtgccggtgcacacggcgagcgagctcaccatgcgccacagccggtacctcctcaccggcgtgcggctctcctcggagcctgccgcgtccccggcgccgccgtcggaggaggagaacagcagcagcttctgctgcagcgccgacgacgccgtgccggccccggcggcgcccgccacgagccacggcgggagcagcggcagcagcagcatctccgagtacctcaccacgctgcccgggtggcacgtcgaggacttcctcgtcgacgacgccactgccgaggccgccgccgccgccgccgccacctcttccggcatctccgcgaacgggccgtgtcagggggtaacacggatcggagggctgcaagaatccgccggctaccctgcgtggatggcgcagcagcagctgtgctgcgacggcctcgtcgccggcgacgcgtcgccggctagccgggagcggtgggtgccgcagatgtacgcggatcagcttgccgccggcagcaagagatccaggacgtccactgcttcttcctactcctactgg

SEQ ID NO: 76 - protein, 269 aa, Oryza sativa
  Os02g43170.1, domain coordinates 5-42, 65-102, ortholog of AtBBX20 (G1888), AtBBX21 (G1482)
MKVQCDVCAAEAASVFCCADEAALCDACDHRVHRANKLAGKHRRFSLLNPSASGRSPTSTTAPLCDICQEKRGFLFCKEDRAILCRECDVPVHTASELTMRHSRYLLTGVRLSSEPAASPAPPSEEENSSSFCCSADDAVPAPAAPATSHGGSSGSSSISEYLTTLPGWHVEDFLVDDATAEAAAAAAATSSGISANGPCQGVTRIGGLQESAGYPAWMAQQQLCCDGLVAGDASPASRERWVPQMYADQLAAGSKRSRTSTASSYSYW

SEQ ID NO: 77 - DNA, 624 bp, Oryza sativa
  Os02g43170.2, ortholog of AtBBX20 (G1888), AtBBX21 (G1482)
atgaaggtgcagtgcgacgtgtgcgcggccgaggcggcgtcggtgttctgctgcgccgacgaggccgcgctgtgcgacgcgtgcgaccaccgggtgcaccgggccaacaagctcgccgggaagcaccgccggttctcgctgctcaacccctcggcgtccggccgctcgccgacatcgacgacggcgccgctctgcgacatctgccaggagaagaggggtttcctgttctgcaaggaggaccgggcgatcctgtgccgcgagtgcgacgtgccggtgcacacggcgagcgagctcaccatgcgccacagccggtacctcctcaccggcgtgcggctctcctcggagcctgccgcgtccccggcgccgccgtcggaggaggagaacagcagcagcttctgctgcagcgccgacgacgccgtgccggccccggcggcgcccgccacgagccacggcgggagcagcggcagcagcagcatctccgagtacctcaccacgctgcccgggtggcacgtcgaggacttcctcgtcgacgacgccactgccgaggccgccgccgccgccgccgccacctcttccggcatctccgcgaacgggccgtgtcaggttggtgccactgatcgacca

SEQ ID NO: 78 - protein, 208 aa, Oryza sativa
  Os02g43170.2, domain coordinates 5-42, 65-102, ortholog of AtBBX20 (G1888), AtBBX21 (G1482)
MKVQCDVCAAEAASVFCCADEAALCDACDHRVHRANKLAGKHRRFSLLNPSASGRSPTSTTAPLCDICQEKRGFLFCKEDRAILCRECDVPVHTASELTMRHSRYLLTGVRLSSEPAASPAPPSEEENSSSFCCSADDAVPAPAAPATSHGGSSGSSSISEYLTTLPGWHVEDFLVDDATAEAAAAAAATSSGISANGPCQVGATDRP

SEQ ID NO: 79 - DNA, 750 bp, Oryza sativa
  Os04g45690.1, ortholog of AtBBX20 (G1888), AtBBX21 (G1482)
atgaaggtgcagtgcgacgtgtgcgcggccgaggccgcctcggtcttctgctgcgccgacgaggccgcgctgtgcgacgcgtgcgaccgccgcgtccacagcgcgaacaagctcgccgggaagcaccgccgattctccctcctccaaccgttggcgtcgtcgtcgtccgcccagaagccaccgctctgcgacatctgtcaggagaagagggggttcttgttctgcaaggaggacagggcgatcctgtgccgggagtgcgacgtcacggtgcacaccacgagcgagctgacgaggcggcacggccggttcctcctcaccggcgtgcgcctctcgtcggcgccgatggactcccccgcgccgtcggaggaagaggaggaggaagcaggggaggactacagctgcagccccagcagcgtcgccggcaccgccgcggggagcgcgagcgacgggagcagcatctccgagtacctcaccaagacgctgcccggttggcacgtcgaggacttcctcgtcgacgaggccaccgccgcctcctcctcctcagacgggctatttcagggtgggctgctggctcagatcggtggggtgccggacggttacgcggcgtgggccggccgggagcagctgcacagtggcgtcgctgtcgccgccgacgagcgggccagccgcgagcggtgggtgccgcagatgaacgcggagtggggcgccggcagcaagcgacccagggcgtcgcctccctgcttgtactgg

SEQ ID NO: 80 - protein, 250 aa, Oryza sativa
  Os04g45690.1, domain coordinates 5-42, 63-100, ortholog of AtBBX20 (G1888), AtBBX21 (G1482)
MKVQCDVCAAEAASVFCCADEAALCDACDRRVHSANKLAGKHRRFSLLQPLASSSSAQKPPLCDICQEKRGFLFCKEDRAILCRECDVTVHTTSELTRRHGRFLLTGVRLSSAPMDSPAPSEEEEEEAGEDYSCSPSSVAGTAAGSASDGSSISEYLTKTLPGWHVEDFLVDEATAASSSSDGLFQGGLLAQIGGVPDGYAAWAGREQLHSGVAVAADERASRERWVPQMNAEWGAGSKRPRASPPCLYW

SEQ ID NO: 81 - DNA, 753 bp, Oryza sativa
  G5159,, ortholog of AtBBX20 (G1888), AtBBX21 (G1482)
atgaaggtgcagtgcgacgtgtgcgcggccgaggccgcctcggtcttctgctgcgccgacgaggccgcgctgtgcgacgcgtgcgaccgccgcgtccacagcgcgaacaagctcgccgggaagcaccgccgattctccctcctccaaccgttggcgtcgtcgtcgtccgcccagaagccaccgctctgcgacatctgtcaggagaagagggggttcttgttctgcaaggaggacagggcgatcctgtgccgggagtgcgacgtcacggtgcacaccacgagcgagctgacgaggcggcacggccggttcctcctcaccggcgtgcgcctctcgtcggcgccgatggactcccccgcgccgtcggaggaagaggaggaggaagcaggggaggactacagctgcagccccagcagcgtcgccggcaccgccgcggggagcgcgagcgacgggagcagcatctccgagtacctcaccaagacgctgcccggttggcacgtcgaggacttcctcgtcgacgaggccaccgccggcttctcctcctcagacgggctatttcagggtgggctgctggctcagatcggtggggtgccggacggttacgcggcgtgggccggccgggagcagctgcacagtggcgtcgctgtcgccgccgacgagcgggccagccgcgagcggtgggtgccgcagatgaacgcggagtggggcgccggcagcaagcgacccagggcgtcgcctccctgcttgtactggtga

SEQ ID NO: 82 - protein, 250 aa, Oryza sativa
  G5159, domain coordinates 5-42, 63-100, ortholog of AtBBX20 (G1888), AtBBX21 (G1482)
MKVQCDVCAAEAASVFCCADEAALCDACDRRVHSANKLAGKHRRFSLLQPLASSSSAQKPPLCDICQEKRGFLFCKEDRAILCRECDVTVHTTSELTRRHGRFLLTGVRLSSAPMDSPAPSEEEEEEAGEDYSCSPSSVAGTAAGSASDGSSISEYLTKTLPGWHVEDFLVDEATAGFSSSDGLFQGGLLAQIGGVPDGYAAWAGREQLHSGVAVAADERASRERWVPQMNAEWGAGSKRPRASPPCLYW

SEQ ID NO: 83 - DNA, 924 bp, Oryza sativa
  Os06g49880.1, ortholog of AtBBX20 (G1888), AtBBX21 (G1482)
atgcgggtgcagtgcgacgtctgcgccgccgagccggccgcggtgctctgctgcgccgacgaggccgcgctctgctccgcctgcgaccgccgcgtccaccgcgccaaccgcctcgccagcaagcaccgccgcctcccgctcgtccacccgtcctcctcctcctccggcgacggtggcgccgccgccgcgccgctgtgcgacgtgtgcagggagaagaggggcctcgtgttctgcgtcgaggaccgcgccatcctgtgcgccgactgcgacgagcccatccactccgccaacgacctcaccgccaagcacacccgcttcctcctcgtcggcgccaagctctcccccgccgcgctcgccgaacagccgctcccgtcctccgactgcagctccgacgacgacgccgccgccgccgccaccgaggaggagtaccactcctccgccgcatccaccggcgccgcagtgagcgcgcctcttgacgcctccagcaacggcgccggtggcggaggaggagtaggagggagcagcatctccgactacctcaccaccatctgccccggctggcgcgtcgaggacctcctccccgacgacgacgccttcgccgccgccgccgcgcaggcggggaaagagaaggacgagcgcgtgccgttcctcgacgccgacctgttcgacgtggtcgccggccggccggagaagaagggcggcgcgtgggcgccgcacgtgccgcacctgccggcgtggtgcctcgacgaggtgccggtcgtcgtcgccgcgtcggcggcgccagcggcgacacctgtaaaggcgaagcagggacacgtgcgggacagccactggagcgacagcgacgcgttcgccgtgccggagttctcgccgccgccgccgccggccaagagggcgcggcccagctcgcagttctggtgcttc

SEQ ID NO: 84 - protein, 308 aa, Oryza sativa
  Os06g49880.1, domain coordinates 5-42, 66-103, ortholog of AtBBX20 (G1888), AtBBX21 (G1482)
MRVQCDVCAAEPAAVLCCADEAALCSACDRRVHRANRLASKHRRLPLVHPSSSSSGDGGAAAAPLCDVCREKRGLVFCVEDRAILCADCDEPIHSANDLTAKHTRFLLVGAKLSPAALAEQPLPSSDCSSDDDAAAAATEEEYHSSAASTGAAVSAPLDASSNGAGGGGGVGGSSISDYLTTICPGWRVEDLLPDDDAFAAAAAQAGKEKDERVPFLDADLFDVVAGRPEKKGGAWAPHVPHLPAWCLDEVPVVVAASAAPAATPVKAKQGHVRDSHWSDSDAFAVPEFSPPPPPAKRARPSSQFWCF

SEQ ID NO: 85 - DNA, 921 bp, Oryza sativa
  Os06g49880.2, ortholog of AtBBX20 (G1888), AtBBX21 (G1482)
atgcgggtgcagtgcgacgtctgcgccgccgagccggccgcggtgctctgctgcgccgacgaggccgcgctctgctccgcctgcgaccgccgcgtccaccgcgccaaccgcctcgccagcaagcaccgccgcctcccgctcgtccacccgtcctcctcctcctccggcgacggtggcgccgccgccgcgccgctgtgcgacgtgtgcagggagaagaggggcctcgtgttctgcgtcgaggaccgcgccatcctgtgcgccgactgcgacgagcccatccactccgccaacgacctcaccgccaagcacacccgcttcctcctcgtcggcgccaagctctcccccgccgcgctcgccgaacagccgctcccgtcctccgactgcagctccgacgacgacgccgccgccgccgccaccgaggaggagtaccactcctccgccgcatccaccggcgccgcagtgagcgcgcctcttgacgcctccagcaacggcgccggtggcggaggaggagtaggagggagcagcatctccgactacctcaccaccatctgccccggctggcgcgtcgaggacctcctccccgacgacgacgccttcgccgccgccgccgcggcggggaaagagaaggacgagcgcgtgccgttcctcgacgccgacctgttcgacgtggtcgccggccggccggagaagaagggcggcgcgtgggcgccgcacgtgccgcacctgccggcgtggtgcctcgacgaggtgccggtcgtcgtcgccgcgtcggcggcgccagcggcgacacctgtaaaggcgaagcagggacacgtgcgggacagccactggagcgacagcgacgcgttcgccgtgccggagttctcgccgccgccgccgccggccaagagggcgcggcccagctcgcagttctggtgcttc

SEQ ID NO: 86 - protein, 307 aa, Oryza sativa
  Os06g49880.2, domain coordinates 5-42, 66-103, ortholog of AtBBX20 (G1888), AtBBX21 (G1482)
MRVQCDVCAAEPAAVLCCADEAALCSACDRRVHRANRLASKHRRLPLVHPSSSSSGDGGAAAAPLCDVCREKRGLVFCVEDRAILCADCDEPIHSANDLTAKHTRFLLVGAKLSPAALAEQPLPSSDCSSDDDAAAAATEEEYHSSAASTGAAVSAPLDASSNGAGGGGGVGGSSISDYLTTICPGWRVEDLLPDDDAFAAAAAAGKEKDERVPFLDADLFDVVAGRPEKKGGAWAPHVPHLPAWCLDEVPVVVAASAAPAATPVKAKQGHVRDSHWSDSDAFAVPEFSPPPPPAKRARPSSQFWCF

SEQ ID NO: 87 - DNA, 957 bp, Glycine max
  Glyma04g01120.1, ortholog of AtBBX20 (G1888), AtBBX21 (G1482)
atgaagatccagtgtgctgtgtgtgacaaagtggaagcctccgtcttctgctctgcagatgaagctgctctttgccatagttgtgaccgcaccattcaccacgccaacaagcttgcaaccaaacacccacgcttctctctccattaccccacctcccaagacttccctctttgtgatatttgccaagagaggcgtgcatatctattttgccaagaagacagggcattgctatgcagggagtgtgacgttcctatccacagggcgaatgagcatacccagaagcataacaggtttcttctcaccggagtgaagctctctggtacttctttggatcctgctgcgtcctccaccaattgcacccatggctctgaaggaagaaacaacgctcgatctagaatgaacagacccagatcatcagtttccaatgaagaaaatgcaagtaattcttcttgcaaggttgaagacaacgtggctagtgacactggttcggtttcaactagcagcatttctgagtacttgatcgaaacaatacccggttactgttttgaagaccttcttgatgcttcatttgcacctaatggtttctgtaagaaccagaactatgatcgtcataggcgtttcaggaccaagatcttcaagttattaggacgtgtttggtttgagttaaggagattccaaaatcttaacgctatcgatgatcaactgtttgtaaaaatctgttggaaaatatcttcttttgtttttgttatttgcatttctttttgggctccctgctgcattctttatgatttttttttcattctctattcccgaccactgtttcggcctcttattttagtatttttttcaattttcattgggttaattaataatattttttgggggggggtccatgcttttattgacatgaacatgaattcattgaataacgcaactgaatattatgtgccactttct

SEQ ID NO: 88 - protein, 319 aa, Glycine max
  Glyma04g01120.1, domain coordinates 5-42, 58-95, ortholog of AtBBX20 (G1888), AtBBX21 (G1482)
MKIQCAVCDKVEASVFCSADEAALCHSCDRTIHHANKLATKHPRFSLHYPTSQDFPLCDICQERRAYLFCQEDRALLCRECDVPIHRANEHTQKHNRFLLTGVKLSGTSLDPAASSTNCTHGSEGRNNARSRMNRPRSSVSNEENASNSSCKVEDNVASDTGSVSTSSISEYLIETIPGYCFEDLLDASFAPNGFCKNQNYDRHRRFRTKIFKLLGRVWFELRRFQNLNAIDDQLFVKICWKISSFVFVICISFWAPCCILYDFFFILYSRPLFRPLILVFFSIFIGLINNIFWGGVHAFIDMNMNSLNNATEYYVPLS

SEQ ID NO: 89 - DNA, 798 bp, Glycine max
  G5365, Glyma04g02960.1, ortholog of AtBBX20 (G1888), AtBBX21 (G1482)
atgaagatccactgcgacgtgtgtaacaagcaccaggcctctttcttctgcaccgccgacgaagctgccctatgcgacggctgcgaccaccgcgtccaccacgccaacaagctcgcctccaaacaccaacgcttctccctcacccacccctctgcgaaacattttcccctctgcgatgtttgccaggagagaagagccttcgtgttttgtcagcaagatagagcgattctgtgcaaagagtgtgacgtgcccattcattctgccaacgacctcaccaagaaccatagcaggtttcttctcactgggattaagttctctgcttctgccacgccttatgattattcatcaccaccaccaccaccaccaccaccaccacccaagagaaaccctgttctcgattctccttcaacaccgtcaccgcctaagcctgggggaaactcgctaacaaacgaagaagaacctggtttcacaggtagcagcatttcagagtacttgataaactctatcccaggcatgaagttcgaagatttcctcgattcacattctcttccctttgcttgctccaagaatagtgatgacatgttgtcgctgtttggtgagggaaacatggtttctttctcacccggtgggttctgggttcctcaagcaccaccatcttcagtacaaatggatcggcagagtgggtacagagagacaagggaaggtagcattagatcaagttttggagatgataatttcatagttccacagatgagtcctcccagcaatgtgtctaataagagatccaggcttctctgg

SEQ ID NO: 90 - protein, 266 aa, Glycine max
  G5365, Glyma04g02960.1, domain coordinates 5-42, 58-95, ortholog of AtBBX20 (G1888), AtBBX21 (G1482)
MKIHCDVCNKHQASFFCTADEAALCDGCDHRVHHANKLASKHQRFSLTHPSAKHFPLCDVCQERRAFVFCQQDRAILCKECDVPIHSANDLTKNHSRFLLTGIKFSASATPYDYSSPPPPPPPPPPKRNPVLDSPSTPSPPKPGGNSLTNEEEPGFTGSSISEYLINSIPGMKFEDFLDSHSLPFACSKNSDDMLSLFGEGNMVSFSPGGFWVPQAPPSSVQMDRQSGYRETREGSIRSSFGDDNFIVPQMSPPSNVSNKRSRLLW

SEQ ID NO: 91 - DNA, 582 bp, Glycine max
  Glyma04g02960.2, ortholog of AtBBX20 (G1888), AtBBX21 (G1482)
atgaagatccactgcgacgtgtgtaacaagcaccaggcctctttcttctgcaccgccgacgaagctgccctatgcgacggctgcgaccaccgcgtccaccacgccaacaagctcgcctccaaacaccaacgcttctccctcacccacccctctgcgaaacattttcccctctgcgatgtttgccaggagagaagagccttcgtgttttgtcagcaagatagagcgattctgtgcaaagagtgtgacgtgcccattcattctgccaacgacctcaccaagaaccatagcaggtttcttctcactgggattaagttctctgcttctgccacgccttatgattattcatcaccaccaccaccaccaccaccaccaccacccaagagaaaccctgttctcgattctccttcaacaccgtcaccgcctaagcctgggggaaactcgctaacaaacgaagaagaacctggtttcacaggtagcagcatttcagagtacttgataaactctatcccaggcatgaagttcgaagatttcctcgattcacattctcttccctttgcttgctccaagcaattgatcatagtt

SEQ ID NO: 92 - protein, 194 aa, Glycine max
  Glyma04g02960.2, domain coordinates 5-42, 58-95, ortholog of AtBBX20 (G1888), AtBBX21 (G1482)
MKIHCDVCNKHQASFFCTADEAALCDGCDHRVHHANKLASKHQRFSLTHPSAKHFPLCDVCQERRAFVFCQQDRAILCKECDVPIHSANDLTKNHSRFLLTGIKFSASATPYDYSSPPPPPPPPPPKRNPVLDSPSTPSPPKPGGNSLTNEEEPGFTGSSISEYLINSIPGMKFEDFLDSHSLPFACSKQLIIV

SEQ ID NO: 93 - DNA, 714 bp, Glycine max
  Glyma06g01140.1, ortholog of AtBBX20 (G1888), AtBBX21 (G1482)
atgaagatccagtgtgatgtgtgtgacaaagtggaagcctccgtcttctgtcctgcagatgaagctgctctttgccatagctgtgatcgcaccattcaccgcgccaacaagcttgcaaccaaacacgcccgtttctctctccactaccccacctccaaagacttccctctttgtgatatatgccaagagaggcgtgcatatctattttgccaagaagacagggcgttgttatgcagggaatgcgacgttcctatccacagagccaatgagcatacccaaaagcataacaggtttcttctcacgggtgtgaagctctctggtacttgtttagatcctgcttcgtcctccaccaattacaccaataataatagagtcactggctctgaaggaagaaacgacgctcgatctagaatgaacagacccagatcatcagtttccaatgaagaaaatgcaagtaattcttcttgcaaggttgaagacaacgtggctagtgacactggttcgatttcaactagcagcatttctgagtacttgattgaaacaatacccggttactgttttgaagacctccttgatgcttcgtttgcacctaatggtttcttaacttgtttttcttctcagaagcagaactttgatcatccctgggcgtttcaggaccaaaagcgaacaagtggagacactatggccgtgccgttcctgaaactagtcatccat

SEQ ID NO: 94 - protein, 238 aa, Glycine max
  Glyma06g01140.1, domain coordinates 5-42, 58-95, ortholog of AtBBX20 (G1888), AtBBX21 (G1482)
MKIQCDVCDKVEASVFCPADEAALCHSCDRTIHRANKLATKHARFSLHYPTSKDFPLCDICQERRAYLFCQEDRALLCRECDVPIHRANEHTQKHNRFLLTGVKLSGTCLDPASSSTNYTNNNRVTGSEGRNDARSRMNRPRSSVSNEENASNSSCKVEDNVASDTGSISTSSISEYLIETIPGYCFEDLLDASFAPNGFLTCFSSQKQNFDHPWAFQDQKRTSGDTMAVPFLKLVIH

SEQ ID NO: 95 - DNA, 735 bp, Glycine max
  G5367. Glyma06g02970.1, ortholog of AtBBX20 (G1888), AtBBX21 (G1482)
atgaagatccagtgcgacgtgtgtaacaaacagcaggcatcgttgttctgcaccgccgacgaagccgccctatgcgacggctgcgaccaccgcgtccaccacgccaacaagctcgcctccaaacaccaacgcttctccctcagccacccctctgcaaaacattttcctctctgcgatgtttgccaggagagaagagcctttgtgttttgtcagcaagatagagcgattctgtgcaaagagtgtgacgtgcccgttcattctgccaacgacctcaccaagaaccataacaggtttcttctcactgggattaagttttctgccctcgattctccttcaacacctcctaagcctgcaggtggaaactccctaacaaatcaacaaccacaacaacaaactggtttcacaggtagcagcatatcagaatacttgataaacactatcccaggcatggagttcgaagatttcctcgattcacattctcttccctttgcttgctccaagaatagtgatgacatgatgttgtcgatgtttggtgagggaaacatggtttcgttctcagccggagggatctgggttcctcaagcaccatcttcagtacaaatggatcagcagagtgggtacaaagacacatgggaaactagcattagatcaagttttggggatgatagtttattagttccacagatgactcctcccagcaatgtgtttaataataagagatccaggcttctatgg

SEQ ID NO: 96 - protein, 245 aa, Glycine max
  G5367, Glyma06g02970.1, domain coordinates 5-42, 58-95, ortholog of AtBBX20 (G1888), AtBBX21 (G1482)
MKIQCDVCNKQQASLFCTADEAALCDGCDHRVHHANKLASKHQRFSLSHPSAKHFPLCDVCQERRAFVFCQQDRAILCKECDVPVHSANDLTKNHNRFLLTGIKFSALDSPSTPPKPAGGNSLTNQQPQQQTGFTGSSISEYLINTIPGMEFEDFLDSHSLPFACSKNSDDMMLSMFGEGNMVSFSAGGIWVPQAPSSVQMDQQSGYKDTWETSIRSSFGDDSLLVPQMTPPSNVFNNKRSRLLW

SEQ ID NO: 97 - DNA, 864 bp, Glycine max
  Glyma11g12060.1, ortholog of AtBBX20 (G1888), AtBBX21 (G1482)
atgaagatccagtgtgatgtgtgtcacaatgaagttgcttcctttttctgcccctctgatgaagcctctctctgccatgcttgtgatcgcaccatccaccatgccaacaagctcgcagacaaacacaaacgcttctcccttcaccaccccacttccaaagactcccctctttgtgatatctgtcatgagaggcgtgcatatcttttttgcaaagaggacagagcaatactatgtagagaatgtgatctttctattcatggggtcaacgaacataccaagaaacacaacaggtttcttctcactggcgtaaagatcggtgctgatgcttcagacccaacatcactttcctcaaatgacactgccattgaagaaagaacaacctctagttctaaaataaacagaccaataagttctttgtcaaatgagaatatcagttcttctcccacggttggagacaacatggcttgtgacacgggttcggtttcaactagcagcatttctgagtacttgattcagaccattcccggttactgcatggaagatcttttagatgcttcatttgcatctaatggtttatctaaggattatgagcaccaatcagcgtttcagaaccaagatgttcaagtcagcatgtgttcgtttccactgcaaagttgggtaccacaatctcaagctggatcccctcaactaattagcactacctcgaatcttcatccccagattaattctttagttggagtaatggaaatgcctaaagccaaagctagtgaaggatactccaattgcatatataattatgactactcagcttacaaagttccttcaatttgtcctccattgatcaaaaaatgtaaacgctctcgt

SEQ ID NO: 98 - protein, 288 aa, Glycine max
  Glyma11g12060.1, domain coordinates 5-42, 58-95, ortholog of AtBBX20 (G1888), AtBBX21 (G1482)
MKIQCDVCHNEVASFFCPSDEASLCHACDRTIHHANKLADKHKRFSLHHPTSKDSPLCDICHERRAYLFCKEDRAILCRECDLSIHGVNEHTKKHNRFLLTGVKIGADASDPTSLSSNDTAIEERTTSSSKINRPISSLSNENISSSPTVGDNMACDTGSVSTSSISEYLIQTIPGYCMEDLLDASFASNGLSKDYEHQSAFQNQDVQVSMCSFPLQSWVPQSQAGSPQLISTTSNLHPQINSLVGVMEMPKAKASEGYSNCIYNYDYSAYKVPSICPPLIKKCKRSR

SEQ ID NO: 99 - DNA, 828 bp, Glycine max
  G5396 Glyma14g40650.1, ortholog of AtBBX20 (G1888), AtBBX21 (G1482)
atgaagatccagtgcgacgtgtgcaacaaacacgaggcctccgtcttctgcacagccgacgaagccgccctctgcgacggctgcgaccaccgtgtccaccatgccaacaaactcgcctccaaacaccaacgcttctctcttctccgcccttctcataaacaacaccctctctgcgatatttgccaggagagaagagccttcacgttctgtcagcaagacagagcgattctctgcaaagagtgtgacgtgtcaattcactctgccaacgaacacacccttaagcacgataggttccttctcactggtgttaaactcgcagcttctgccatgcttcgttcatcacaaactacctctgattcaaactcaaccccttctcttcttaacgtttcacatcaaactactccacttccatcttccaccaccaccaccaccaccaacaacaacaacaacaaggttgctgttgaaggaactggttcaacgagtgctagcagcatatcagagtatttgatagagactcttcctgggtggcaagttgaggactttctcgattcatattttgttccctttggtttctgtaagaatgatgaagtgttgccacggttggatgctgacgtggaggggcatatgggttcgttttcaaccgagaacatggggatctgggttcctcaagcgccaccacctcttgtgtgttcttcacaaatggatcgggtgatagttcaaagtgagaccaacatcaaaggtagcagcatatcgaggttgaaggatgatactttcactgttccacagattagtcctccctccaattccaagagagccagatttctatgg

SEQ ID NO: 100 - protein, 276 aa, Glycine max
  G5396 Glyma14g40650.1, domain coordinates 5-42, 58-95, ortholog of AtBBX20 (G1888), AtBBX21 (G1482)
MKIQCDVCNKHEASVFCTADEAALCDGCDHRVHHANKLASKHQRFSLLRPSHKQHPLCDICQERRAFTFCQQDRAILCKECDVSIHSANEHTLKHDRFLLTGVKLAASAMLRSSQTTSDSNSTPSLLNVSHQTTPLPSSTTTTTTNNNNNKVAVEGTGSTSASSISEYLIETLPGWQVEDFLDSYFVPFGFCKNDEVLPRLDADVEGHMGSFSTENMGIWVPQAPPPLVCSSQMDRVIVQSETNIKGSSISRLKDDTFTVPQISPPSNSKRARFLW

SEQ ID NO: 101 - DNA, 834 bp, Glycine max
  G5400 Glyma17g37430.1, ortholog of AtBBX20 (G1888), AtBBX21 (G1482)
atgaagatccagtgcgacgtttgcaacaaacacgaggcctccgtcttctgcaccgccgatgaagccgccctctgcgacggctgcgaccaccgtgtccaccatgccaacaaactcgcctccaaacaccaacgcttctctcttctccgcccttctcctaaacaacaccctctctgcgatatttgccaggagagaagagcctttacattctgtcagcaagacagagcgattctctgcaaagagtgtgacgtgtcaattcactctgccaacgaacacacccttaagcacgataggttccttctcaccggtgttaaactttctgcttctgctatgcttcgttcgtcagaaactacctctgattcaaactcaaacccttctcttcttaacttttcacaccaaacaacattactacctccatcttccaccaccaccaccaccaccagcaacaacaacaacaacaaggttgctgttgaaggaactggttcaactagtgctagcagcatatcggagtatttgatagagactcttcctgggtggcaagttgaagactttcttgattcatattctgttccctttggtttctgtaaggatgatgaagtgttgccacggtttgatggtgaaatggaggggcatctgagttctttctcaaccgagaacatggggatctgggttcctcaagcgccaccaactcttatgtgttcttcacaaatggatcgggtgatagttcacggtgagaccaatatcaaaggtagcagcagatcaaggttgaaggatgataatttcactgttccacagattagtcctccttccaattccaagagagccagatttctgtgg

SEQ ID NO: 102 - protein, 278 aa, Glycine max
  G5400 Glyma17g37430.1, domain coordinates 5-42, 58-95, ortholog of AtBBX20 (G1888), AtBBX21 (G1482)
MKIQCDVCNKHEASVFCTADEAALCDGCDHRVHHANKLASKHQRFSLLRPSPKQHPLCDICQERRAFTFCQQDRAILCKECDVSIHSANEHTLKHDRFLLTGVKLSASAMLRSSETTSDSNSNPSLLNFSHQTTLLPPSSTTTTTTSNNNNNKVAVEGTGSTSASSISEYLIETLPGWQVEDFLDSYSVPFGFCKDDEVLPRFDGEMEGHLSSFSTENMGIWVPQAPPTLMCSSQMDRVIVHGETNIKGSSRSRLKDDNFTVPQISPPSNSKRARFLW

SEQ ID NO: 103 - DNA, 1116 bp, Arabidopsis thaliana
  AtBBX7 (G2440), AT3G07650.1, paralog of AtBBX8 (G1479)
atgggttacatgtgtgacttctgtggtgaacaaagatctatggtgtactgtcgatccgatgcagcttgtttgtgtctctcctgtgaccggagtgttcattccgctaatgcattgtccaaacgacattctcggacacttgtctgcgagagatgcaatgctcagcctgctactgtcaggtgtgttgaagaaagggtttcactctgtcaaaactgtgactggtctggccacaacaacagcaacaacaacaattcttcgtcttcttctacttcgccgcagcagcataagaggcaaaccataagttgctattcgggttgcccttccagctcagaactcgcttccatttggtctttctgtttggacttagctggacaatctatttgtgaacaagaactgggtatgatgaatatagacgatgatggtcctaccgacaagaaaacttgtaatgaggataagaaagatgtcttggttggatcctcttcaattcctgaaaccagttctgtaccacaaggaaaatcatcttctgctaaggatgttggaatgtgtgaagatgacttctacgggaaccttggtatggatgaagttgacatggcacttgagaactatgaagaactctttggtaccgcctttaacccctctgaagagctattcgggcatggtggaatcgatagccttttccataagcaccaaacagctccagagggagggaattcggtgcagccagcaggcagtaatgattcgttcatgagttcgaaaactgagccaataatttgcttcgcatcgaagccagcacattcgaacatatccttctctggagtcactggagaaagtagtgctggagatttccaagaatgtggtgcatcatcttccatacagctctcgggggagccaccatggtatcctccaacattacaggataacaatgcctgctcacattcagtaacccgtaataacgcagttatgcgttacaaggagaagaagaaggctcgcaagtttgataagagagtgaggtatgcttcccgcaaagcaagagctgatgtgagacggcgtgtaaaggggcgatttgtcaaagctggtgaagcttatgattacgaccctctcaccccaaccagaagttat

SEQ ID NO: 104 - protein, 372 aa, Arabidopsis thaliana
  AtBBX7 (G2440), AT3G07650.1, domain coordinates 5-42, 48-76, 315-356, paralog of AtBBX8 (G1479)
MGYMCDFCGEQRSMVYCRSDAACLCLSCDRSVHSANALSKRHSRTLVCERCNAQPATVRCVEERVSLCQNCDWSGHNNSNNNNSSSSSTSPQQHKRQTISCYSGCPSSSELASIWSFCLDLAGQSICEQELGMMNIDDDGPTDKKTCNEDKKDVLVGSSSIPETSSVPQGKSSSAKDVGMCEDDFYGNLGMDEVDMALENYEELFGTAFNPSEELFGHGGIDSLFHKHQTAPEGGNSVQPAGSNDSFMSSKTEPIICFASKPAHSNISFSGVTGESSAGDFQECGASSSIQLSGEPPWYPPTLQDNNACSHSVTRNNAVMRYKEKKKARKFDKRVRYASRKARADVRRRVKGRFVKAGEAYDYDPLTPTRSY

SEQ ID NO: 105 - DNA, 1119 bp, Arabidopsis thaliana
  AtBBX8 (G1479), AT5G48250.1, paralog of AtBBX7 (G2440)
atgggttatatgtgtgatttctgtggtgaacaaagatcaatggtgtattgtcgatctgatgcagcgtgtttgtgtctttcgtgtgaccgtaatgttcattctgctaatgctctatcgaaacgtcattcgcggactttggtatgtgagaggtgtaatgcacagccagcttctgtccggtgtagtgatgagagggtttctctatgtcaaaactgtgattggtcaggccatgacggcaagaattctactactacttcacatcataaaaggcaaaccatcaattgttattctggttgtccctcgagtgccgaattatcctcgatatggtctttctgtatggatttgaatatctcttctgctgaagaatccgcttgtgagcaaggaatgggtttgatgactatagatgaagatggcacaggagaaaaatctggtgtccaaaaaattaatgtagaacagcctgaaaccagttcggctgcacaaggtatggatcactctagtgttccagaaaattcatcaatggctaaggagcttggagtatgtgaggatgacttcaatggaaatctcatttcagatgaagtagacttggctcttgagaactatgaagaactctttggttcagccttcaactcatcaagatatctcttcgagcacggtggaattggaagtcttttcgagaaagatgaagctcatgagggctcaatgcagcagccagcattaagcaataatgcatctgcagattcgttcatgacttgtagaaccgagccaataatttgctattcatcaaagccagcacattcgaatatctccttctctggcatcactggagaaagtaatgctggagatttccaagattgtggggcgtcatcgatgaagcagctttcaagggagccacaaccatggtgccatccaacagcacaggacattattgcttcctcacatgcaacaacacgtaataacgctgttatgcgttacaaggaaaagaagaaggctcgcaagtttgacaagcgagtaaggtatgtctctaggaaagaaagggctgatgtgagacggcgtgtgaaaggacggtttgtcaagtccggtgaagcttatgattacgacccgatgagcccaacaagaagctac

SEQ ID NO: 106 - protein, 373 aa, Arabidopsis thaliana
  AtBBX8 (G1479), AT5G48250.1, domain coordinates 5-42, 48-76, 316-357, paralog of AtBBX7 (G2440)
MGYMCDFCGEQRSMVYCRSDAACLCLSCDRNVHSANALSKRHSRTLVCERCNAQPASVRCSDERVSLCQNCDWSGHDGKNSTTTSHHKRQTINCYSGCPSSAELSSIWSFCMDLNISSAEESACEQGMGLMTIDEDGTGEKSGVQKINVEQPETSSAAQGMDHSSVPENSSMAKELGVCEDDFNGNLISDEVDLALENYEELFGSAFNSSRYLFEHGGIGSLFEKDEAHEGSMQQPALSNNASADSFMTCRTEPIICYSSKPAHSNISFSGITGESNAGDFQDCGASSMKQLSREPQPWCHPTAQDIIASSHATTRNNAVMRYKEKKKARKFDKRVRYVSRKERADVRRRVKGRFVKSGEAYDYDPMSPTRSY

SEQ ID NO: 107 - DNA, 1218 bp, Zea mays
  ACF80403.1, ortholog of AtBBX7 (G2440), AtBBX8 (G1479)
atggttcctctctgtggtttctgtgggaaacaaaggtcaatgatctactgcagatcggatgcggcatcattgtgcttatcatgcgaccgtagcgttcattcagctaatgcactgtctcggcgtcatagaaggacccttctttgtgatcgttgtggtttacagcctgcatcagtccgatgtcttgaggacaacacatcactttgccaaaactgtgattggaatgggcatgatgcagcatcaggggcttctgggcataaaaggcaggccataaactgttactcagggtgcccatcatcagcagagctttcgagaatctggtcatttattatcgatatcccgactgtagctgctgagcccaactgtgaggatgggctaagcatgatgacaattgatgacagtgatgtgactaatcatcacggtgcttcagatgataaacgattgttggaaatagctaacacagcactcatgagtgatccaccttcacctgacaagcttaaacctctgataggctcttcttctggagatgggtttgatgttctgcctctagccacagatcagcctgctggaccagtttcagcgacacctaaggtaccttatgccagagatgacaataagttcaatgatggcatgtatgaagacttatgtgtggatgatgctgacctgacattcgagaattatgaagagctattcggtacctctcacattcgaatagaggaactctttgatgacgccggaattgacagttactttgaaatgaaggaaacaccgccttttgatttcaatgagcagcccaaaattgtgcagctacaatgtagcgatgtggtaccagctgattgtgcgatgtcaaacacaggggaaagggctgattccagcctttgtattcctgttaggcaggtcagatctagtatatcccatcccttatctggtttgactggtgagagcagcgctggagatcaccaagactgtggggtgtcaccaattctcctcatgggcgagccaccctggtattctcctggtccagaaggctcattagctggaggaagcagagatagtgctctcacacgatacaaggagaagaagaagaaaagaatgtttgacaagaagatcagatatgcttctcgcaaggctagggcagacgtgaggaagagggtcaagggacggtttataaaggctggcgaagcgtatgactatgatccactaagtcaaactagaagctac

SEQ ID NO: 108 - protein, 406 aa, Zea mays
  ACF80403.1, domain coordinates 5-42, 48-85, 349-390, ortholog of AtBBX7 (G2440), AtBBX8 (G1479)
MVPLCGFCGKQRSMIYCRSDAASLCLSCDRSVHSANALSRRHRRTLLCDRCGLQPASVRCLEDNTSLCQNCDWNGHDAASGASGHKRQAINCYSGCPSSAELSRIWSFIIDIPTVAAEPNCEDGLSMMTIDDSDVTNHHGASDDKRLLEIANTALMSDPPSPDKLKPLIGSSSGDGFDVLPLATDQPAGPVSATPKVPYARDDNKFNDGMYEDLCVDDADLTFENYEELFGTSHIRIEELFDDAGIDSYFEMKETPPFDFNEQPKIVQLQCSDVVPADCAMSNTGERADSSLCIPVRQVRSSISHPLSGLTGESSAGDHQDCGVSPILLMGEPPWYSPGPEGSLAGGSRDSALTRYKEKKKKRMFDKKIRYASRKARADVRKRVKGRFIKAGEAYDYDPLSQTRSY

SEQ ID NO: 109 - DNA, 1221 bp, Zea mays
  ACG34885.1, ortholog of AtBBX7 (G2440), AtBBX8 (G1479)
atgggcgctctctgtgatttctgtggggagcagaggtctatggtttactgccgatcagatgcagcatccttgtgtttatcatgtgaccgtaatgtgcattcagctaatgctctttctcggcgtcatacaaggacacttttatgtgaccggtgtgcttcacagcctgctatggtccgctgtctagcagaaaatgcctcgctttgccaaaattgtgattggaatggccacattgcaggatcctcatctgccggacacaaaaggcagactataaattgctattcaggatgtccatcgtctgcagaactttctagaatatggtccttcgtttcagatattcctaatgtagcacctgagccaaactgtgagcaaggaataagcatgatgagcatcagcgacagtggtgtcagtaatcaagataatgctgcaggggacagtattttgttagatatagctagtgcaacacttgtaagtgatattggtacttgtgacaagcttttggtaggttcctcttcaggagctggagtgaacctacttccactggttactggtcaaacagaaacagctggatctgtggattccacaccagataaggttccctatacgccagataaagatatgttcagtaaggacagcatatatgaagatttttgtgtggatgacgctgaccttgctttcgaaaattatgaagaactctttggtacctctcatattcaaacagaacaactctttgatgatgctggaatagacatttactttgaaatgaaggaagcacctgctgggaattccactgagtccaagctgaagcaacctgcaaatagcaatgcggtatctgccgactctgggatgtcgaaccctggagtgaaaggtgattccagtgtttgtacccctttgaggcaggctaggtctagtctgtctctttcctttgctggtttgactggtgagagtagtgcgggagacaaccaagattgtgtggtatcatcattgcttcttatgggtgagcctccttggcagcctcctggccccgagggctcaattgctggaggtagtagagacagtgcactcacacgatacaaggagaagaaaatgagaagaaagttcgacaagaaaatcaggtacgcttctcgtaaggctagagcagatgtgcgaaagagggtaaagggtcggtttgttaaggctggtgaagcatatgactatgatcctctctgccaaacgaggagttac

SEQ ID NO: 110 - protein, 407 aa, Zea mays
  ACG34885.1, domain coordinates 5-42, 48-85, 350-391, ortholog of AtBBX7 (G2440), AtBBX8 (G1479)
MGALCDFCGEQRSMVYCRSDAASLCLSCDRNVHSANALSRRHTRTLLCDRCASQPAMVRCLAENASLCQNCDWNGHIAGSSSAGHKRQTINCYSGCPSSAELSRIWSFVSDIPNVAPEPNCEQGISMMSISDSGVSNQDNAAGDSILLDIASATLVSDIGTCDKLLVGSSSGAGVNLLPLVTGQTETAGSVDSTPDKVPYTPDKDMFSKDSIYEDFCVDDADLAFENYEELFGTSHIQTEQLFDDAGIDIYFEMKEAPAGNSTESKLKQPANSNAVSADSGMSNPGVKGDSSVCTPLRQARSSLSLSFAGLTGESSAGDNQDCVVSSLLLMGEPPWQPPGPEGSIAGGSRDSALTRYKEKKMRRKFDKKIRYASRKARADVRKRVKGRFVKAGEAYDYDPLCQTRSY

SEQ ID NO: 111 - DNA, 1218 bp, Zea mays; identical to SEQ ID NO: 107
  ACG44361.1, ortholog of AtBBX7 (G2440), AtBBX8 (G1479)

SEQ ID NO: 112 - protein, 406 aa, Zea mays; identical to SEQ ID NO: 108
  ACG44361.1, domain coordinates 5-42, 48-85, 349-390, ortholog of AtBBX7 (G2440), AtBBX8 (G1479)

SEQ ID NO: 113 - DNA, 1221 bp, Zea mays
  ACN25813.1, ortholog of AtBBX7 (G2440), AtBBX8 (G1479)
atggcttctctctgtgatttctgtgggaaacaaaggtcaatgatctactgcagatcagatgcggcatcattgtgcttatcatgcgaccgtaatgttcattcagctaatgcactgtctcgacgtcatacaaggacccttctttgtgatcgttgtggttcacagcctgcatcagtccgatgtcttgaggacaacgcatcactttgccaaaactgtgactggaatgggcatgatgcagaatcaggggcttctggacataaaaggcaagccataaactgctactcagggtgcccatcatctgcagagctttcgagaatctggtcatttattactgatatcccgactgtagcagctgagcccgactatgaggatggactaagcatgatgacaattgatggcagtgatgttactaatcgtcacgatacttcagatgataaaagattgttggaaatagctaacacaacactcatgagcgatccaccttcagccgacaagcttaaatctccgacaggctcttcttctggagatgggtttgatgttatgactctagccacagatcagcctgctggaccagtttcagcaacgcctaaggtacctaatgccagagatgatgataagttcaatgatggcatgtacgaagacttgtgtgtagatgatgctgaccttacattcgaggattatgaagagctatttggtacctctcacattcgaacagaggaactctttgatgacgctggaattgacggttacttcgaattgaaagagacaccacctttttatttcaacgagcagcccaaagctatgcagatagaatgtggcaacgtggtatcagctgattgtgcgatgtcaaacccaggggcaagggctgattccagcctttgtattcccgtcaggcaggtcagatctagtatatcccactccttatctggtctgactggtgagagcagcgctggagatcaccacgactgtggggtgtcaccgatgctcctcatgggtgagccaccctggcattctcctggtggtccagaaggctcagtcgctggaggcagcagagatagcgctctcacacggtacaaggagaagaagaagaggagaaagtttgacaagaagatcagatatgcttctcgcaaggctagggcggacgtgaggaagcgggtcaagggacggttcataaaggccggtgaagcgtacgactatgatccgctaagccagactagaagctac

SEQ ID NO: 114 - protein, 407 aa, Zea mays
  ACN25813.1, domain coordinates 5-42, 48-85, 350-391, ortholog of AtBBX7 (G2440), AtBBX8 (G1479)
MASLCDFCGKQRSMIYCRSDAASLCLSCDRNVHSANALSRRHTRTLLCDRCGSQPASVRCLEDNASLCQNCDWNGHDAESGASGHKRQAINCYSGCPSSAELSRIWSFITDIPTVAAEPDYEDGLSMMTIDGSDVTNRHDTSDDKRLLEIANTTLMSDPPSADKLKSPTGSSSGDGFDVMTLATDQPAGPVSATPKVPNARDDDKFNDGMYEDLCVDDADLTFEDYEELFGTSHIRTEELFDDAGIDGYFELKETPPFYFNEQPKAMQIECGNVVSADCAMSNPGARADSSLCIPVRQVRSSISHSLSGLTGESSAGDHHDCGVSPMLLMGEPPWHSPGGPEGSVAGGSRDSALTRYKEKKKRRKFDKKIRYASRKARADVRKRVKGRFIKAGEAYDYDPLSQTRSY

SEQ ID NO: 115 - DNA, 1218 bp, Zea mays; identical to SEQ ID NO: 107
  NP_001131822.1, ortholog of AtBBX7 (G2440), AtBBX8 (G1479)

SEQ ID NO: 116 - protein, 406 aa, Zea mays; identical to SEQ ID NO: 108
  NP_001131822.1, domain coordinates 5-42, 48-85, 349-390, ortholog of AtBBX7 (G2440), AtBBX8 (G1479)

SEQ ID NO: 117 - DNA, 1221 bp, Zea mays; identical to SEQ ID NO: 109
  NP_001149294.1, ortholog of AtBBX7 (G2440), AtBBX8 (G1479)

SEQ ID NO: 118 - protein, 407 aa, Zea mays; identical to SEQ ID NO: 110
  NP_001149294.1, domain coordinates 5-42, 48-85, 350-391, ortholog of AtBBX7 (G2440), AtBBX8 (G1479)

SEQ ID NO: 119 - DNA, 1137 bp, Populus trichocarpa
  Pt_247140, ortholog of AtBBX7 (G2440), AtBBX8 (G1479)
atgggttacgtttgtgatttttgtggggaacaaaggtccatggtttattgccggtcagatgctgcaagcttatgtttatcatgcgatcgaaatgttcattctgctaatgctttgtccaagcgtcattcacggaccctcttatgtgaaagatgcaattcacaaccagcgttagttagatgtgctgaagaaagaatctctctatgtcaaaattgtgattggattggccatggcacctcgacatcagcttccacacatagaaggcaaacgatcaattcttactctggctgtccatcagcttctgagctttcttcaatatggtcatttgttttagacttcccttccagaggtgaatctacttgtgagcaggagttgggtttgatgagcattgctgaaaatagcaccacagactcctggggtcctacagagaatactattggccaaaatgcatctggagttgttgaagttaatgacaggcgtgaaatagctaaatcaggtgtttggcttgggtcttcttcgatacctgaatcgagctctgtgccaaacaatctagaccagacaaccagatccgcaaatacatctttgcctaaggacttcaatatggatgaaatggatttgagtctcgaaaactatgaagaactctttggtgttaccctcaataattcagaagagcttcttgagaatggtggcattgatagcttatttgggacaaaggacatgtctgtggtcaacgccgtacagccagcaagcagcaacgcagcatctgctgattctatgatgagcaataagactgaaccaatcctttgttttacggaaaagcaaggccattccagcctctcattttctggccttaatgtagagagtagtgctgcagattatcaagattgtggagcatcttcaatgcttcttatgggagagcctccctggtgccccccatgccccgagagtcccttctcatcagctaaccggagtgatgctgtaatgcgttacaaggaaaagaagaagacacggatgtttgaaaagaaagtgaggtatgcatctcgcaaagcaagggcagatgtaagaaggcgtgtgaagggtcgttttgtcaaagctggtgaagcttatgattacgacccacttagccaaacgagaagtttc

SEQ ID NO: 120 - protein, 379 aa, Populus trichocarpa
  Pt_247140, domain coordinates 5-42, 48-85, 322-363, ortholog of AtBBX7 (G2440), AtBBX8 (G1479)
MGYVCDFCGEQRSMVYCRSDAASLCLSCDRNVHSANALSKRHSRTLLCERCNSQPALVRCAEERISLCQNCDWIGHGTSTSASTHRRQTINSYSGCPSASELSSIWSFVLDFPSRGESTCEQELGLMSIAENSTTDSWGPTENTIGQNASGVVEVNDRREIAKSGVWLGSSSIPESSSVPNNLDQTTRSANTSLPKDFNMDEMDLSLENYEELFGVTLNNSEELLENGGIDSLFGTKDMSVVNAVQPASSNAASADSMMSNKTEPILCFTEKQGHSSLSFSGLNVESSAADYQDCGASSMLLMGEPPWCPPCPESPFSSANRSDAVMRYKEKKKTRMFEKKVRYASRKARADVRRRVKGRFVKAGEAYDYDPLSQTRSF

SEQ ID NO: 121 - DNA, 1137 bp, Populus trichocarpa
  Pt_409151, ortholog of AtBBX7 (G2440), AtBBX8 (G1479)
atgggttatatttgtgatttttgtggggagcaaaggtccatggtttattgccggtcagatgctgcgtgcttatgcttatcatgcgatcaaattgttcattctgctaatgccttgtccaagcgtcactcacggaccctcttatgtgaaagatgcaattcacaacctgcattagttagacgcgtggaagaaagaatctctctttgtcagaattgtgattggatgggctatggctcctcaacatcagcttccacacataaaaggcaaacgatcaattgttactttggctgtccatcagtttctgagctttcttcaaaatggccattcattttagactccccttctgggggtggatctacttgtgagcaggagttgggtttaatgagcattgctgaaaatagcaccaaaaacacctggggtccgacagagaatactatttgccataatgcatctggaattgttggggcttcttcagtacctgaatcaagctctgtgccaaaaaatttagaccagccaaccagatctccaaattcatctttgccaaaggtatgtgatgctgatctttatgaggacttcaatatggctgaaatggatttgaatcttgaaaactatgaagaactatttggtgttaccctcaataattcagaagagctttttgagaatggtggcattgatagcttatttgggacaaaggacatgcccattgttgattccaattttggactggtcaacacaatacagccaacatgcagcaacgcaccatctactgattctatgattagtagtaagactgaaccaatcctttgttttacggcaaagcaaggccattccagcctatcattttctggccttactggagagagtaatgctggagattatcaagactgtggagcatcttcaatgcttctcatgggagagccttcatggtgtcccccgtgccttgagagtcctttaccttcagctaaccgaagtgatgcggtaaagcgttacatggaaaagaaaaagacacgcaagtttgaaaagaaagtgaggtatgcgtctcgcaaagcaagggcagatgtaagaaggcgtgtgaagggtcgttttgtcaaagctggtgatgcttatgattatgacccactgggccaaacaagaagtttc

SEQ ID NO: 122 - protein, 379 aa, Populus trichocarpa
  Pt_409151, domain coordinates 5-42, 48-85, 322-363, ortholog of AtBBX7 (G2440), AtBBX8 (G1479)
MGYICDFCGEQRSMVYCRSDAACLCLSCDQIVHSANALSKRHSRTLLCERCNSQPALVRRVEERISLCQNCDWMGYGSSTSASTHKRQTINCYFGCPSVSELSSKWPFILDSPSGGGSTCEQELGLMSIAENSTKNTWGPTENTICHNASGIVGASSVPESSSVPKNLDQPTRSPNSSLPKVCDADLYEDFNMAEMDLNLENYEELFGVTLNNSEELFENGGIDSLFGTKDMPIVDSNFGLVNTIQPTCSNAPSTDSMISSKTEPILCFTAKQGHSSLSFSGLTGESNAGDYQDCGASSMLLMGEPSWCPPCLESPLPSANRSDAVKRYMEKKKTRKFEKKVRYASRKARADVRRRVKGRFVKAGDAYDYDPLGQTRSF

SEQ ID NO: 123 - DNA, 1221 bp, Oryza sativa
  Os02g49230.1, ortholog of AtBBX7 (G2440), AtBBX8 (G1479)
atggatgctctttgtgatttctgcagggagcaaaggtcaatggtctattgccgatcagatgcagcatccttgtgcttgtcgtgtgatcgtaatgtgcattcagccaatgccctttcccgacgccatacaagaacccttctttgtgatcgttgtgttggacagcctgcagcagtccgttgtcttgaagagaacacctcactttgccaaaactgtgactggaatggacatggggcagcatcctcagctgctgggcataaaaggcagaccataaactgttactcggggtgcccatcgtcggcagagctctcgagaatctggtcctttagtatggatatcccaactgtagctgcggagccaaactgtgaggaaggaataaacatgatgagcattaatgacaatgacgtcaataaccattgtggtgctccagaagatggccgcttgttggatatagctagcacagcactcatgagtgatttacctacaggagacaagttcaaacctttaataggttcttcttcaggagatgggatgaatcttctgccacttaattcagatcagccagctgagccagtttcaacgacgcctaaggcaccctgtgtcacagacaaagatatgttcaatgatgggagcgtatatggagacttctgtgtggatgatgctgacctaacatttgagaattatgaagaattattcggtacctctcacgttcaaacagaacaactctttgatgatgctggaattgacagttattttgaaatgaaggatgtgccagcagatgaatctaatgagcagcccaaacctgtgcagccagaatgtagcaatgtcgcatctgttgattctgggatgtcaaacccagctgcaagggctgattccagccattgtattcctggtaggcaggctatatccaacatatccctttccttctctggtttgactggtgaaagcagtgctggatattttcaagattgtggggtatcgtcaatgatccttatgggtgagccaccctggcatcctcctggtcctgaaagttcatctgctggaggcagcagagataatgctcttacacggtacaaggagaagaagaagagaagaaaatttgacaagaagataaggtatgcttctcgtaaggctagggcagatgtgagaaaaagggtcaaaggacggtttgtaaaggctggcgaagcatatgactacgatccgctgagccaaacaagaagctac

SEQ ID NO: 124 - protein, 407 aa, Oryza sativa
  Os02g49230.1, domain coordinates 5-42, 48-85, 350-391, ortholog of AtBBX7 (G2440), AtBBX8 (G1479)
MDALCDFCREQRSMVYCRSDAASLCLSCDRNVHSANALSRRHTRTLLCDRCVGQPAAVRCLEENTSLCQNCDWNGHGAASSAAGHKRQTINCYSGCPSSAELSRIWSFSMDIPTVAAEPNCEEGINMMSINDNDVNNHCGAPEDGRLLDIASTALMSDLPTGDKFKPLIGSSSGDGMNLLPLNSDQPAEPVSTTPKAPCVTDKDMFNDGSVYGDFCVDDADLTFENYEELFGTSHVQTEQLFDDAGIDSYFEMKDVPADESNEQPKPVQPECSNVASVDSGMSNPAARADSSHCIPGRQAISNISLSFSGLTGESSAGYFQDCGVSSMILMGEPPWHPPGPESSSAGGSRDNALTRYKEKKKRRKFDKKIRYASRKARADVRKRVKGRFVKAGEAYDYDPLSQTRSY

SEQ ID NO: 125 - DNA, 1440 bp, Oryza sativa
  Os02g49230.2, ortholog of AtBBX7 (G2440), AtBBX8 (G1479)
atgctaataagccatcccatgctgagcaattcaagtggttcatttcatggcctgtatcaatatacttatatatctccaacacttaccaaggaatggaaacaaactcatcattatcctggtaggatcccactgaattcaactgttgaacaaaaagccaggaaggtggctgttcttgtggcactcagtgctagtggaagtgctccagtactgtacaggaccatggatgctctttgtgatttctgcagggagcaaaggtcaatggtctattgccgatcagatgcagcatccttgtgcttgtcgtgtgatcgtaatgtgcattcagccaatgccctttcccgacgccatacaagaacccttctttgtgatcgttgtgttggacagcctgcagcagtccgttgtcttgaagagaacacctcactttgccaaaactgtgactggaatggacatggggcagcatcctcagctgctgggcataaaaggcagaccataaactgttactcggggtgcccatcgtcggcagagctctcgagaatctggtcctttagtatggatatcccaactgtagctgcggagccaaactgtgaggaaggaataaacatgatgagcattaatgacaatgacgtcaataaccattgtggtgctccagaagatggccgcttgttggatatagctagcacagcactcatgagtgatttacctacaggagacaagttcaaacctttaataggttcttcttcaggagatgggatgaatcttctgccacttaattcagatcagccagctgagccagtttcaacgacgcctaaggcaccctgtgtcacagacaaagatatgttcaatgatgggagcgtatatggagacttctgtgtggatgatgctgacctaacatttgagaattatgaagaattattcggtacctctcacgttcaaacagaacaactctttgatgatgctggaattgacagttattttgaaatgaaggatgtgccagcagatgaatctaatgagcagcccaaacctgtgcagccagaatgtagcaatgtcgcatctgttgattctgggatgtcaaacccagctgcaagggctgattccagccattgtattcctggtaggcaggctatatccaacatatccctttccttctctggtttgactggtgaaagcagtgctggatattttcaagattgtggggtatcgtcaatgatccttatgggtgagccaccctggcatcctcctggtcctgaaagttcatctgctggaggcagcagagataatgctcttacacggtacaaggagaagaagaagagaagaaaatttgacaagaagataaggtatgcttctcgtaaggctagggcagatgtgagaaaaagggtcaaaggacggtttgtaaaggctggcgaagcatatgactacgatccgctgagccaaacaagaagctac

SEQ ID NO: 126 - protein, 480 aa, Oryza sativa
  Os02g49230.2, domain coordinates 78-115, 121-158, 423-464, ortholog of AtBBX7 (G2440), AtBBX8 (G1479)
MLISHPMLSNSSGSFHGLYQYTYISPTLTKEWKQTHHYPGRIPLNSTVEQKARKVAVLVALSASGSAPVLYRTMDALCDFCREQRSMVYCRSDAASLCLSCDRNVHSANALSRRHTRTLLCDRCVGQPAAVRCLEENTSLCQNCDWNGHGAASSAAGHKRQTINCYSGCPSSAELSRIWSFSMDIPTVAAEPNCEEGINMMSINDNDVNNHCGAPEDGRLLDIASTALMSDLPTGDKFKPLIGSSSGDGMNLLPLNSDQPAEPVSTTPKAPCVTDKDMFNDGSVYGDFCVDDADLTFENYEELFGTSHVQTEQLFDDAGIDSYFEMKDVPADESNEQPKPVQPECSNVASVDSGMSNPAARADSSHCIPGRQAISNISLSFSGLTGESSAGYFQDCGVSSMILMGEPPWHPPGPESSSAGGSRDNALTRYKEKKKRRKFDKKIRYASRKARADVRKRVKGRFVKAGEAYDYDPLSQTRSY

SEQ ID NO: 127 - DNA, 1221 bp, Oryza sativa; identical to SEQ ID NO: 123
  Os02g49230.3, ortholog of AtBBX7 (G2440), AtBBX8 (G1479)

SEQ ID NO: 128 - protein, 407 aa, Oryza sativa; identical to SEQ ID NO: 124
  Os02g49230.3, domain coordinates 5-42, 48-85, 350-391, ortholog of AtBBX7 (G2440), AtBBX8 (G1479)

SEQ ID NO: 129 - DNA, 1221 bp, Oryza sativa; identical to SEQ ID NO: 123
  Os02g49230.4, ortholog of AtBBX7 (G2440), AtBBX8 (G1479)

SEQ ID NO: 130 - protein, 407 aa, Oryza sativa; identical to SEQ ID NO: 124
  Os02g49230.4, domain coordinates 5-42, 48-85, 350-391, ortholog of AtBBX7 (G2440), AtBBX8 (G1479)

SEQ ID NO: 131 - DNA, 1218 bp, Oryza sativa
  Os02g49230.5, ortholog of AtBBX7 (G2440), AtBBX8 (G1479)
atggatgctctttgtgatttctgcagggagcaaaggtcaatggtctattgccgatcagatgcagcatccttgtgcttgtcgtgtgatcgtaatgtgcattcagccaatgccctttcccgacgccatacaagaacccttctttgtgatcgttgtgttggacagcctgcagcagtccgttgtcttgaagagaacacctcactttgccaaaactgtgactggaatggacatggggcagcatcctcagctgctgggcataaaaggcagaccataaactgttactcggggtgcccatcgtcggcagagctctcgagaatctggtcctttagtatggatatcccaactgtagctgcggagccaaactgtgaggaaggaataaacatgatgagcattaatgacaatgacgtcaataaccattgtggtgctccagaagatggccgcttgttggatatagctagcacagcactcatgagtgatttacctacaggagacaagttcaaacctttaataggttcttcttcaggagatgggatgaatcttctgccacttaattcagatcagccagctgagccagtttcaacgacgcctaaggcaccctgtgtcacagacaaagatatgttcaatgatgggagcgtatatggagacttctgtgtggatgatgctgacctaacatttgagaattatgaagaattattcggtacctctcacgttcaaacagaacaactctttgatgatgctggaattgacagttattttgaaatgaaggatgtgccagcagatgaatctaatgagcccaaacctgtgcagccagaatgtagcaatgtcgcatctgttgattctgggatgtcaaacccagctgcaagggctgattccagccattgtattcctggtaggcaggctatatccaacatatccctttccttctctggtttgactggtgaaagcagtgctggatattttcaagattgtggggtatcgtcaatgatccttatgggtgagccaccctggcatcctcctggtcctgaaagttcatctgctggaggcagcagagataatgctcttacacggtacaaggagaagaagaagagaagaaaatttgacaagaagataaggtatgcttctcgtaaggctagggcagatgtgagaaaaagggtcaaaggacggtttgtaaaggctggcgaagcatatgactacgatccgctgagccaaacaagaagctac

SEQ ID NO: 132 - protein, 406 aa, Oryza sativa
  Os02g49230.5, domain coordinates 5-42, 48-85, 349-390, ortholog of AtBBX7 (G2440), AtBBX8 (G1479)
MDALCDFCREQRSMVYCRSDAASLCLSCDRNVHSANALSRRHTRTLLCDRCVGQPAAVRCLEENTSLCQNCDWNGHGAASSAAGHKRQTINCYSGCPSSAELSRIWSFSMDIPTVAAEPNCEEGINMMSINDNDVNNHCGAPEDGRLLDIASTALMSDLPTGDKFKPLIGSSSGDGMNLLPLNSDQPAEPVSTTPKAPCVTDKDMFNDGSVYGDFCVDDADLTFENYEELFGTSHVQTEQLFDDAGIDSYFEMKDVPADESNEPKPVQPECSNVASVDSGMSNPAARADSSHCIPGRQAISNISLSFSGLTGESSAGYFQDCGVSSMILMGEPPWHPPGPESSSAGGSRDNALTRYKEKKKRRKFDKKIRYASRKARADVRKRVKGRFVKAGEAYDYDPLSQTRSY

SEQ ID NO: 133 - DNA, 1221 bp, Oryza sativa; identical to SEQ ID NO: 123
  Os02g49230.6, ortholog of AtBBX7 (G2440), AtBBX8 (G1479)

SEQ ID NO: 134 - protein, 407 aa, Oryza sativa; identical to SEQ ID NO: 124
  Os02g49230.6, domain coordinates 5-42, 48-85, 350-391, ortholog of AtBBX7 (G2440), AtBBX8 (G1479)

SEQ ID NO: 135 - DNA, 1224 bp, Oryza sativa
  Os06g19444.1, ortholog of AtBBX7 (G2440), AtBBX8 (G1479)
atgggcgctctttgtgatttctgcggggagcagaggtctatggtttattgccgatcagatgcagcatccttgtgcttatcgtgtgaccgtaatgtgcattcagctaatgctctttctcggcgccatacaaggacacttctgtgtgatagatgtgcttcacagcctgccatggtccgctgccttgtagaaaatgcctcgctttgccaaaattgtgattggaatgggcatagtgctgggtcttcagctgctggtcataagaggcagaccataaactgctactcagggtgcccatcatcttcagaactttcaaaaatctggacatttgtttcggatattcctaatgtagctcctgagccgaattgcgagcaagggataagcatgatgagcatcagcgacagtggtgtcagtaatcaagacaatgctgcaggggacagcagtttgttagatattgctagtgcaacccttatgagtgatcttggcactgctggcaagccaaagtctttgataggctcctcatctgaagctggcgtgaaccttcttccacttgctactgatcagatggctggatccgtggattcgacatcagctaaggtgccctatacggcagaccaagatatgttcagcaaagacagtatatatgaagatttctgtgtggacgatgttgatcttagtttcgaaaattatgaggaactatttggcacctcccatattcaaacagagcaactgtttgatgatgctgggatcgacagttactttgaatcgaaggaaataccttctggaaactctgatgagcagcccaagctgatgcagccagtgaccagcaatgcagtatctgctgattcagggatgtcgatcccaggagccaaaggtgattccagtctttgtatacctgtgaggcaagctaggtccagtatctctctttcattttctggtttgactggtgagagcagtgctggagattaccaagattgtggggtatcaccagtgctccttatgggtgagcctccttggcatcctcctggccctgaggggtcatttgctggagctaccagagacgatgctatcacacgatacaaggagaagaagaagagaagaaaatttgacaagaaaatcaggtatgcatctcgcaaggctagggcagatgtgagaaaaagagtcaagggccggtttgttaaggctggtgaagcatacgactacgatccactctgtgaaacgaggagctac

SEQ ID NO: 136 - protein, 408 aa, Oryza sativa
  Os06g19444.1, domain coordinates 5-42, 48-85, 351-392, ortholog of AtBBX7 (G2440), AtBBX8 (G1479)
MGALCDFCGEQRSMVYCRSDAASLCLSCDRNVHSANALSRRHTRTLLCDRCASQPAMVRCLVENASLCQNCDWNGHSAGSSAAGHKRQTINCYSGCPSSSELSKIWTFVSDIPNVAPEPNCEQGISMMSISDSGVSNQDNAAGDSSLLDIASATLMSDLGTAGKPKSLIGSSSEAGVNLLPLATDQMAGSVDSTSAKVPYTADQDMFSKDSIYEDFCVDDVDLSFENYEELFGTSHIQTEQLFDDAGIDSYFESKEIPSGNSDEQPKLMQPVTSNAVSADSGMSIPGAKGDSSLCIPVRQARSSISLSFSGLTGESSAGDYQDCGVSPVLLMGEPPWHPPGPEGSFAGATRDDAITRYKEKKKRRKFDKKIRYASRKARADVRKRVKGRFVKAGEAYDYDPLCETRSY

SEQ ID NO: 137 - DNA, 1221 bp, Oryza sativa
  Os06g19444.2, ortholog of AtBBX7 (G2440), AtBBX8 (G1479)
atgggcgctctttgtgatttctgcggggagcagaggtctatggtttattgccgatcagatgcagcatccttgtgcttatcgtgtgaccgtaatgtgcattcagctaatgctctttctcggcgccatacaaggacacttctgtgtgatagatgtgcttcacagcctgccatggtccgctgccttgtagaaaatgcctcgctttgccaaaattgtgattggaatgggcatagtgctgggtcttcagctgctggtcataagaggcagaccataaactgctactcagggtgcccatcatcttcagaactttcaaaaatctggacatttgtttcggatattcctaatgtagctcctgagccgaattgcgagcaagggataagcatgatgagcatcagcgacagtggtgtcagtaatcaagacaatgctgcaggggacagcagtttgttagatattgctagtgcaacccttatgagtgatcttggcactgctggcaagccaaagtctttgataggctcctcatctgaagctggcgtgaaccttcttccacttgctactgatcagatggctggatccgtggattcgacatcagctaaggtgccctatacggcagaccaagatatgttcagcaaagacagtatatatgaagatttctgtgtggacgatgttgatcttagtttcgaaaattatgaggaactatttggcacctcccatattcaaacagagcaactgtttgatgatgctgggatcgacagttactttgaatcgaaggaaataccttctggaaactctgatgagcccaagctgatgcagccagtgaccagcaatgcagtatctgctgattcagggatgtcgatcccaggagccaaaggtgattccagtctttgtatacctgtgaggcaagctaggtccagtatctctctttcattttctggtttgactggtgagagcagtgctggagattaccaagattgtggggtatcaccagtgctccttatgggtgagcctccttggcatcctcctggccctgaggggtcatttgctggagctaccagagacgatgctatcacacgatacaaggagaagaagaagagaagaaaatttgacaagaaaatcaggtatgcatctcgcaaggctagggcagatgtgagaaaaagagtcaagggccggtttgttaaggctggtgaagcatacgactacgatccactctgtgaaacgaggagctac

SEQ ID NO: 138 - protein, 407 aa, Oryza sativa
  Os06g19444.2, domain coordinates 5-42, 48-85, 350-391, ortholog of AtBBX7 (G2440), AtBBX8 (G1479)
MGALCDFCGEQRSMVYCRSDAASLCLSCDRNVHSANALSRRHTRTLLCDRCASQPAMVRCLVENASLCQNCDWNGHSAGSSAAGHKRQTINCYSGCPSSSELSKIWTFVSDIPNVAPEPNCEQGISMMSISDSGVSNQDNAAGDSSLLDIASATLMSDLGTAGKPKSLIGSSSEAGVNLLPLATDQMAGSVDSTSAKVPYTADQDMFSKDSIYEDFCVDDVDLSFENYEELFGTSHIQTEQLFDDAGIDSYFESKEIPSGNSDEPKLMQPVTSNAVSADSGMSIPGAKGDSSLCIPVRQARSSISLSFSGLTGESSAGDYQDCGVSPVLLMGEPPWHPPGPEGSFAGATRDDAITRYKEKKKRRKFDKKIRYASRKARADVRKRVKGRFVKAGEAYDYDPLCETRSY

SEQ ID NO: 139 - DNA, 1215 bp, Glycine max
  Glyma02g38870.1, ortholog of AtBBX7 (G2440), AtBBX8 (G1479)
atgggttacttatgtgatttttgtggagaccagaggtccttggtgtactgccgctctgattccgcgtgcttatgtttgtcatgcgatcgaaatgttcattctgccaatgcactttctaggcgtcattcgagaacccttgtatgcgagagatgcaattcacaacctgcatttgtgaggtctgttgaagagaaaatttcactttgtcagaactgtgattggttgggtcatggtacctcaccgtcttcttcgatgcacaagaggcaatcaatcaattgctactctggctgcccttcagcggcagaattttcttcaatatggtcctttttcttagacatcccttctttgggtgaagcatgtgagcaggaactaggtttgatgagcattaatgagaacattcctccagaagggcagaatgtgtctggttcaactgaagtgactgatctacccagcaagggtaaatcttgggctggcacaccttcaatacctgagtcaagctcagaacctcgtattctggaccagccgcctggacctgccaatgaatgtgtgcccaagttgtactgtcctgggaagaaagcttctggaatatgtgaagatgatgatctatatgatgatttcatcatggatgaagttgatctagaacttgagaactatgaggaactttttgggatggctctcagtcactctgaagagctttttgaaaatggtggaattaatagcttatttgaggcaaaggacatgtctgctagtgctggtgattcccattgtcagggtgctgttgctgctgagggatcgtctgctgggttggtcaatcctatccaaccagcatgcagcaatgcagcatctgcagattcagtgatgagtacaaaaactgaaccaattgtttgttttacggcaaggcaatctcaatcaaacatttccttttctggtgttaccaaagatagtgctggtgactatcaagactgtggtgcttcttcaatgcttctcatgggagaacctccctggtgtcctccttgccctgagagttctctgcattctgctaaccgaagcaatgctgtcatgcgctacaaggaaaaaaagaagacccggaagttcgagaagaaagtaagatatgcctctcgcaaggctagggctgatgtcagaaagcgtgtgaagggccgatttgtcaaagctggtgatgtctatgactatgaccctttgaaccaaaccagaagctac

SEQ ID NO: 140 - protein, 405 aa, Glycine max
  Glyma02g38870.1, domain coordinates 5-42, 48-85, 348-389, ortholog of AtBBX7 (G2440), AtBBX8 (G1479)
MGYLCDFCGDQRSLVYCRSDSACLCLSCDRNVHSANALSRRHSRTLVCERCNSQPAFVRSVEEKISLCQNCDWLGHGTSPSSSMHKRQSINCYSGCPSAAEFSSIWSFFLDIPSLGEACEQELGLMSINENIPPEGQNVSGSTEVTDLPSKGKSWAGTPSIPESSSEPRILDQPPGPANECVPKLYCPGKKASGICEDDDLYDDFIMDEVDLELENYEELFGMALSHSEELFENGGINSLFEAKDMSASAGDSHCQGAVAAEGSSAGLVNPIQPACSNAASADSVMSTKTEPIVCFTARQSQSNISFSGVTKDSAGDYQDCGASSMLLMGEPPWCPPCPESSLHSANRSNAVMRYKEKKKTRKFEKKVRYASRKARADVRKRVKGRFVKAGDVYDYDPLNQTRSY

SEQ ID NO: 141 - DNA, 843 bp, Glycine max
  Glyma13g11590.1, ortholog of AtBBX7 (G2440), AtBBX8 (G1479)
atgagtattaatgagaacaagagtgttggggttcctccagagggccagaatgtgtctggttcagatgaagttactgatcaacctgctttggacaagtctttggttggtacatcttcaatgcctgaatcaagctccaaacctcgtattctggaccagccagctagacctgccaatgaatgtctttcaaagttatactgtcctgctacaaaattccccgcattatgtgaaaatgataatctgtatgatgatttcaacatggatgaagtggatctaaatcttgagaactatgaagaactttttggtatggccctcagtcattctgaagagctatttgaaaatggtggaattgatagcttgtttgggacaaaagacatgtctgctggagatttcagttgtgaggatgctattgctgctgaggcatcacaaattccaactatgttggcacctcagcctcacaatgcagcatctgcagattccattttgagtactaaaactgaaccaattctttgttttacgggaaggcaagctcaatcaaacctttctttttctggcgttaccggagacagtagtgctggagactatcaagactgtggggcttcttcaatgcttctcatgggagaacctccttggtttgctccttgtcctgagaattccctacaatcagccaaccgtagtaatgctgtcatgcggtacaaggaaaagaagaagacacggatgtttgacaaaaaagtgaggtatgcctctcgcaaggcaagggctgatgtcagaaggcgcgtgaaaggccggtttgtcaaagctggtgacgtctacgattatgatcctttgagcacaaccagaagcttc

SEQ ID NO: 142 - protein, 281 aa, Glycine max
  Glyma13g11590.1, domain coordinates 224-265, ortholog of AtBBX7 (G2440), AtBBX8 (G1479)
MSINENKSVGVPPEGQNVSGSDEVTDQPALDKSLVGTSSMPESSSKPRILDQPARPANECLSKLYCPATKFPALCENDNLYDDFNMDEVDLNLENYEELFGMALSHSEELFENGGIDSLFGTKDMSAGDFSCEDAIAAEASQIPTMLAPQPHNAASADSILSTKTEPILCFTGRQAQSNLSFSGVTGDSSAGDYQDCGASSMLLMGEPPWFAPCPENSLQSANRSNAVMRYKEKKKTRMFDKKVRYASRKARADVRRRVKGRFVKAGDVYDYDPLSTTRSF

SEQ ID NO: 143 - DNA, 1233 bp, Glycine max
  Glyma14g36930.1, ortholog of AtBBX7 (G2440), AtBBX8 (G1479)
atgggttacttatgtgatttttgtggagaccagaggtccctggtgtactgccgctctgatgctgcgtgcttatgtttgtcgtgtgatcgaaatgttcattctgctaatgccctttctaggcgtcattcgagaacccttgtatgcgagagatgcaattcgcaacctgcatttgtgaggtgtgttgatgagaagatttcactttgtcagaactgtgattggttgggtcatggtacctcaccatcttcttcgacacacaagaggcaatcaatcaattgctactctggctgcccttcagctgcagaattttcttcaatatggtcctttttcttagacatcccttctatgggtgaagcatgtgagcaggaactaggtttgatgagcattaatgagaacagcaataagaatgcttgggcttctccagaagggcagaatgtgtctggttcagctgaagtgactgatctacccagcaagggtaaatcttgggctggcacatcttcagtacctgagtcaagctcagaacctcgtattctagaccagccgcctggacctgccaatgaatgtatgcccaagttgtactgtcctgggaagaaagtttctggaatatatgaagatgatgatctatatgatgatttcatcatggatgaagtggatctacaacttgagaactacgaggaactttttgggatggctctcagtcactctgaagagctttttgaaaatggtggaattaatagcttatttgagacaaaggacatgtctgctagtgctggtgattcccattgtcagggtgctgttgctgctgagggatcgtctgctgagttggtcaatgctatccaaccagcatgcagcaatgcagcatctgcagactcaatgatgagtacaaaaactgaaccaattgtttgttttacggcaaggcaatctctatcaaacatttctttctctggtgttaccaaagatagtgttggtgactatcaagattgtggtgcttcttcaatgcttctcatgggagagcctccctggtgtcctccttgccctgagagttctctgcattctgctaaccgcagcaatgctgtcatgcgctataaggaaaagaagaagacccggaagttcgagaagaaagtaaggtatgcctctcgcaaggctagggctgatgtcagaaagcgtgtgaagggtcgatttgtcaaagccggtgatgtctatgactatgaccctttgaaccaaaccagaagctgc

SEQ ID NO: 144 - protein, 411 aa, Glycine max
  Glyma14g36930.1, domain coordinates 5-42, 48-85, 354-395, ortholog of AtBBX7 (G2440), AtBBX8 (G1479)
MGYLCDFCGDQRSLVYCRSDAACLCLSCDRNVHSANALSRRHSRTLVCERCNSQPAFVRCVDEKISLCQNCDWLGHGTSPSSSTHKRQSINCYSGCPSAAEFSSIWSFFLDIPSMGEACEQELGLMSINENSNKNAWASPEGQNVSGSAEVTDLPSKGKSWAGTSSVPESSSEPRILDQPPGPANECMPKLYCPGKKVSGIYEDDDLYDDFIMDEVDLQLENYEELFGMALSHSEELFENGGINSLFETKDMSASAGDSHCQGAVAAEGSSAELVNAIQPACSNAASADSMMSTKTEPIVCFTARQSLSNISFSGVTKDSVGDYQDCGASSMLLMGEPPWCPPCPESSLHSANRSNAVMRYKEKKKTRKFEKKVRYASRKARADVRKRVKGRFVKAGDVYDYDPLNQTRSC

SEQ ID NO: 145 - DNA, 1233 bp, Glycine max; identical to SEQ ID NO: 143
  Glyma14g36930.2, ortholog of AtBBX7 (G2440), AtBBX8 (G1479)

SEQ ID NO: 146 - protein, 411 aa, Glycine max; identical to SEQ ID NO: 144
  Glyma14g36930.2, domain coordinates 5-42, 48-85, 354-395, ortholog of AtBBX7 (G2440), AtBBX8 (G1479)

SEQ ID NO: 147 - DNA, 849 bp, Glycine max
  Glyma20g07050.1, ortholog of AtBBX7 (G2440), AtBBX8 (G1479)
atgagtattaatgagaacaagtgtgttggtgttcctccggaagaccagaatgtgtctggttcagatgaagttaccgatctacctgctttgaacaagtctttggttggtgcatctttgatgcctgaatcaagctccgaaccttgtattctggaccagccagctggacctaccaatgaatgtctgccaaagttatactgtcctgctacaaaatgccctgccttatctgaagatgataatctgtatgatgatttcaacatggatgaagtggatctagatcttgagaactatgaagaactttttggtatggccctcagtcattctgaggagctttttgaaaatggtggaattgatagcttgtttgggacaaaaggcatgtctgctggagattccaattgtcaggaagctattgctgctgaggggtcgtcggttggacaggtcaatgcaatgcaaccagcttgcagcaatgcagcgtctgcagattccattttgagtactaaaactgaaccaattctttgttttactggaaggcaaactcaatcaaacctttctttttctggtgttactggagagagtagtgctggagactatcaagactgtggggcttcttcaatgcttctcatgggagaacctccttggtttgctccttgtccggagaattccctacaatccgccaaccgtagtaatgctgtcatgcggtacaaggaaaagaagaagacacggatgtttgacaaaaaagttaggtatgcctctcgcaaggcaagggctgatgtcagaaggcgtgtgaaagggcggtttgtcaaagccggtgacgtctatgattatgaccctttgagcacaaccagaagctgc

SEQ ID NO: 148 - protein, 283 aa, Glycine max
  Glyma20g07050.1, domain coordinates 226-267, ortholog of AtBBX7 (G2440), AtBBX8 (G1479)
MSINENKCVGVPPEDQNVSGSDEVTDLPALNKSLVGASLMPESSSEPCILDQPAGPTNECLPKLYCPATKCPALSEDDNLYDDFNMDEVDLDLENYEELFGMALSHSEELFENGGIDSLFGTKGMSAGDSNCQEAIAAEGSSVGQVNAMQPACSNAASADSILSTKTEPILCFTGRQTQSNLSFSGVTGESSAGDYQDCGASSMLLMGEPPWFAPCPENSLQSANRSNAVMRYKEKKKTRMFDKKVRYASRKARADVRRRVKGRFVKAGDVYDYDPLSTTRSC

SEQ ID NO: 149 - DNA, 849 bp, Glycine max; identical to SEQ ID NO: 147
  Glyma20g07050.2, ortholog of AtBBX7 (G2440), AtBBX8 (G1479)

SEQ ID NO: 150 - protein, 283 aa, Glycine max; identical to SEQ ID NO: 148
  Glyma20g07050.2, domain coordinates 226-267, ortholog of AtBBX7 (G2440), AtBBX8 (G1479)

SEQ ID NO: 151 - DNA, 744 bp, Arabidopsis thaliana
  AtBBX24 (G329), AT1G06040.1, paralog of AtBBX25 (G1894)
atgaagatacagtgtgatgtgtgtgagaaagctccggcgacggtgatttgttgcgccgacgaagctgctctctgtcctcaatgcgacatcgagattcacgccgctaacaaactcgctagcaagcaccaacgtcttcatcttaattccctctccaccaaattccctcgttgcgatatctgccaagagaaggcagctttcattttctgtgtagaggatagagctctgctttgcagggactgcgatgaatccatccacgtggctaattctcgatctgctaatcaccagaggttcttagccactgggatcaaagtagctctgacctcaactatatgtagtaaagaaattgagaagaatcaacctgagccttccaacaaccaacagaaggctaatcagattcctgctaaatccacaagccagcagcaacaacaaccttcttctgctactccacttccctgggctgttgacgatttctttcacttctctgatattgaatccaccgacaagaaaggacagcttgatcttggggcaggggagttggattggttttcagacatgggattcttcggtgatcagattaatgacaaggctcttcctgcagctgaagttcctgagctttctgtttcgcatttaggtcatgttcattcatacaaacctatgaagtcaaatgtttcacacaagaagccgaggtttgagaccagatatgatgatgatgatgaggaacacttcattgtccctgatcttggc

SEQ ID NO: 152 - protein, 248 aa, Arabidopsis thaliana
  AtBBX24 (G329), AT1G06040.1, domain coordinates 5-42, 57-94, paralog of AtBBX25 (G1894)
MKIQCDVCEKAPATVICCADEAALCPQCDIEIHAANKLASKHQRLHLNSLSTKFPRCDICQEKAAFIFCVEDRALLCRDCDESIHVANSRSANHQRFLATGIKVALTSTICSKEIEKNQPEPSNNQQKANQIPAKSTSQQQQQPSSATPLPWAVDDFFHFSDIESTDKKGQLDLGAGELDWFSDMGFFGDQINDKALPAAEVPELSVSHLGHVHSYKPMKSNVSHKKPRFETRYDDDDEEHFIVPDLG

SEQ ID NO: 153 - DNA, 714 bp, Arabidopsis thaliana
  AtBBX25 (G1894), AT2G31380.1, paralog of AtBBX24 (G329)
atgaagatacaatgtgatgtgtgtgagaaagctccggccacgcttatatgttgtgctgatgaagctgctctctgcgctaaatgtgacgttgaggttcatgctgctaataaactcgctagcaaacaccaacgcctttttcttgactctctctcaactaaattccctccctgcgacatctgccttgagaaggcagctttcatattctgtgtagaggatagggctctgctctgcagagattgcgatgaggcgacccatgcgccaaatactcgctctgctaatcaccagaggttcttagccactggaatccgagttgctcttagttccactagttgcaatcaagaagtggaaaagaatcactttgacccatctaatcagcagagtctctctaaaccgccaactcagcaacccgctgctccatctcctttgtgggctaccgatgaattcttcagctactctgatcttgactgcagtaataaggagaaagagcaactcgatctcggggagctggattggcttgcagagatgggtctgtttggtgaccagcctgatcaagaggctctaccggtagccgaagttcccgagctttccttttcacatttggctcatgctcattcctacaacagacctatgaagtccaatgtacccaacaagaagcagaggcttgagtaccggtatgatgatgaagaagagcacttcctagtccccgacctaggc

SEQ ID NO: 154 - protein, 238 aa, Arabidopsis thaliana
  AtBBX25 (G1894), AT2G31380.1, domain coordinates 5-42, 57-94, paralog of AtBBX24 (G329)
MKIQCDVCEKAPATLICCADEAALCAKCDVEVHAANKLASKHQRLFLDSLSTKFPPCDICLEKAAFIFCVEDRALLCRDCDEATHAPNTRSANHQRFLATGIRVALSSTSCNQEVEKNHFDPSNQQSLSKPPTQQPAAPSPLWATDEFFSYSDLDCSNKEKEQLDLGELDWLAEMGLFGDQPDQEALPVAEVPELSFSHLAHAHSYNRPMKSNVPNKKQRLEYRYDDEEEHFLVPDLG

SEQ ID NO: 155 - DNA, 774 bp, Zea mays
  ACF84591.1, ortholog of AtBBX24 (G329), AtBBX25 (G1894)
atgaagatccagtgcgacgcgtgcgagggcgcggctgccacggtggtgtgctgcgccgacgaggccgcgctgtgcgcgcgctgcgacgtcgagatccacgccgccaacaagctcgcgagcaagcaccagcgcctcccgctcgaggcgctctccgccaagctcccgcgctgcgacgtctgccaggagaaagcggcgttcatcttctgcgtggaggaccgggcgctcttctgccaggactgcgacgagcccatccacgtcccgggcacgctctccgggaaccaccagcgctacctggccaccggcatccgcgtcggcctcgcctcggcttccgcctgcagcgacgcctgcgacgcccacgactccgaccaccacgccccgcccaaggccaccatcgagccaccgcacgccgccgtctccgccgcggtgcagcaggtgccctcgccgccgcagttcctgccgcagggctgggccgtcgacgagctcctgcagttctccgactacgagtccagcgacaagctgcacaaggagccgacgctcgggttcaaggagctggagtggttcgccgacatcgacctcttccacgagcaggcgcccaaagccagcaggacgttggcggaggtgccggagcttttcggataccaggcggcgaacgacgcggcgtactacaggccggccaaagccgccgccggcggcggcgctggggttcgccagagcaagaaggcccggatcgaggtcaccgacgacgaggattacctcatagtccctgatcttggt

SEQ ID NO: 156 - protein, 258 aa, Zea mays
  ACF84591.1, domain coordinates 5-42, 57-94, ortholog of AtBBX24 (G329), AtBBX25 (G1894)
MKIQCDACEGAAATVVCCADEAALCARCDVEIHAANKLASKHQRLPLEALSAKLPRCDVCQEKAAFIFCVEDRALFCQDCDEPIHVPGTLSGNHQRYLATGIRVGLASASACSDACDAHDSDHHAPPKATIEPPHAAVSAAVQQVPSPPQFLPQGWAVDELLQFSDYESSDKLHKEPTLGFKELEWFADIDLFHEQAPKASRTLAEVPELFGYQAANDAAYYRPAKAAAGGGAGVRQSKKARIEVTDDEDYLIVPDLG

SEQ ID NO: 157 - DNA, 759 bp, Zea mays
  ACF86823.1, ortholog of AtBBX24 (G329), AtBBX25 (G1894)
atgaagatccagtgcgacgcgtgcgagggcgcggctgccaccgtggtgtgctgcgccgacgaggccgcgctgtgcgcgcgctgcgacgtcgagatccacgccgccaacaagctcgccagcaagcaccagcgcctcccgctcgaggctctctccgccagcctcccgcgctgcgacgtctgccaggagaaagcggcgttcatcttctgcgtggaggaccgggcgctcttctgccgggactgcgacgagcccatccacgtcccgggcacgctctccgggaaccaccagcgctacctcgccaccgacatccgcgtcggcttcgcctccgcttcgtcagcgtgcagtgacgcctgcgacgcccacgacgactccgaccaccacgccccgcccaaggccgccgtctcctccgcggcgcagcaggtgccctcgccgccgcagttcctgccacagggctgggccgtcgacgagctcctgcagttctccgactgcgagtccagcgacaagctgcacaaggagtccccgctcgggttcaaggagctggagtggttcaccgacatcgacctcttccacgagcagacgccgaaagccggcaggagattggctgaggtaccggagctttccggaacccaggccgcgaacgacgcggcgtactacaggccagccaaagccactgccactgccggcgccggggtgcgccagagcaagaaggcccggaccgaggtcaccgacgacgaggaccacctcatcgtccctgatctcggc

SEQ ID NO: 158 - protein, 253 aa, Zea mays
  ACF86823.1, domain coordinates 5-42, 57-94, ortholog of AtBBX24 (G329), AtBBX25 (G1894)
MKIQCDACEGAAATVVCCADEAALCARCDVEIHAANKLASKHQRLPLEALSASLPRCDVCQEKAAFIFCVEDRALFCRDCDEPIHVPGTLSGNHQRYLATDIRVGFASASSACSDACDAHDDSDHHAPPKAAVSSAAQQVPSPPQFLPQGWAVDELLQFSDCESSDKLHKESPLGFKELEWFTDIDLFHEQTPKAGRRLAEVPELSGTQAANDAAYYRPAKATATAGAGVRQSKKARTEVTDDEDHLIVPDLG

SEQ ID NO: 159 - DNA, 759 bp, Zea mays; identical to SEQ ID NO: 157
  ACG28309.1, ortholog of AtBBX24 (G329), AtBBX25 (G1894)

SEQ ID NO: 160 - protein, 253 aa, Zea mays; identical to SEQ ID NO: 158
  ACG28309.1, domain coordinates 5-42, 57-94, ortholog of AtBBX24 (G329), AtBBX25 (G1894)

SEQ ID NO: 161 - DNA, 759 bp, Zea mays
  CAW36812.1, ortholog of AtBBX24 (G329), AtBBX25 (G1894)
atgaagatccagtgcgacgcgtgcgagggcgcggctgccaccgtggtgtgctgcgccgacgaggccgcgctgtgcgcgcgctgcgacgtcgagatccacgccgccaacaagctcgccagcaagcaccagcgcctcccgctcgaggctctctccgccagcctcccgcgctgcgacgtctgccaggagaaagcggcgttcatcttctgcgtggaggaccgggcgctcttctgccgggactgcgacgagcccatccacgtcccgggcacgctctccgggaaccaccagcgctacctcgccaccggcatccgcgtcggcttcgcctccgcttcgtcagcgtgcagtgacgcctgcgacgcccacgacgactccgaccaccacgccccgcccaaggccgccgtctcctccgcggcgcagcaggtgccctcgccgccgcagttcctgccacagggctgggccgtcgacgagctcctgcagttctccgactgcgagtccagcgacaagctgcacaaggagtccccgctcgggttcaaggagctggagtggttcaccgacatcgacctcttccacgagcagacgccgaaagccggcaggagattggccgaggtaccggagctttccggaacccaggccgcgaacgacgcggcgtactacaggccagccaaagccactgccactgccgtcgccggggtgcgccagagcaagaagggccggaccgaggtcaccgacgacgaggaccacctcatcgtccctgatctcgtt

SEQ ID NO: 162 - protein, 253 aa, Zea mays
  CAW36812.1, domain coordinates 5-42, 57-94, ortholog of AtBBX24 (G329), AtBBX25 (G1894)
MKIQCDACEGAAATVVCCADEAALCARCDVEIHAANKLASKHQRLPLEALSASLPRCDVCQEKAAFIFCVEDRALFCRDCDEPIHVPGTLSGNHQRYLATGIRVGFASASSACSDACDAHDDSDHHAPPKAAVSSAAQQVPSPPQFLPQGWAVDELLQFSDCESSDKLHKESPLGFKELEWFTDIDLFHEQTPKAGRRLAEVPELSGTQAANDAAYYRPAKATATAVAGVRQSKKGRTEVTDDEDHLIVPDLV

SEQ ID NO: 163 - DNA, 759 bp, Zea mays; identical to SEQ ID NO: 161
  CAW39068.1, ortholog of AtBBX24 (G329), AtBBX25 (G1894)

SEQ ID NO: 164 - protein, 253 aa, Zea mays; identical to SEQ ID NO: 162
  CAW39068.1, domain coordinates 5-42, 57-94, ortholog of AtBBX24 (G329), AtBBX25 (G1894)

SEQ ID NO: 165 - DNA, 759 bp, Zea mays; identical to SEQ ID NO: 161
  CAW54445.1, ortholog of AtBBX24 (G329), AtBBX25 (G1894)

SEQ ID NO: 166 - protein, 253 aa, Zea mays; identical to SEQ ID NO: 162
  CAW54445.1, domain coordinates 5-42, 57-94, ortholog of AtBBX24 (G329), AtBBX25 (G1894)

SEQ ID NO: 167 - DNA, 759 bp, Zea mays; identical to SEQ ID NO: 161
  CAW74336.1, ortholog of AtBBX24 (G329), AtBBX25 (G1894)

SEQ ID NO: 168 - protein, 253 aa, Zea mays; identical to SEQ ID NO: 162
  CAW74336.1, domain coordinates 5-42, 57-94, ortholog of AtBBX24 (G329), AtBBX25 (G1894)

SEQ ID NO: 169 - DNA, 759 bp, Zea mays; identical to SEQ ID NO: 161
  CAW80388.1, ortholog of AtBBX24 (G329), AtBBX25 (G1894)

SEQ ID NO: 170 - protein, 253 aa, Zea mays; identical to SEQ ID NO: 162
  CAW80388.1, domain coordinates 5-42, 57-94, ortholog of AtBBX24 (G329), AtBBX25 (G1894)

SEQ ID NO: 171 - DNA, 759 bp, Zea mays; identical to SEQ ID NO: 161
  CAW82896.1, ortholog of AtBBX24 (G329), AtBBX25 (G1894)

SEQ ID NO: 172 - protein, 253 aa, Zea mays; identical to SEQ ID NO: 162
  CAW82896.1, domain coordinates 5-42, 57-94, ortholog of AtBBX24 (G329), AtBBX25 (G1894)

SEQ ID NO: 173 - DNA, 759 bp, Zea mays; identical to SEQ ID NO: 157
  NP_001141667.1, ortholog of AtBBX24 (G329), AtBBX25 (G1894)

SEQ ID NO: 174 - protein, 253 aa, Zea mays; identical to SEQ ID NO: 158
  NP_001141667.1, domain coordinates 5-42, 57-94, ortholog of AtBBX24 (G329), AtBBX25 (G1894)

SEQ ID NO: 175 - DNA, 489 bp, Populus trichocarpa
  Pt_216458, ortholog of AtBBX24 (G329), AtBBX25 (G1894)
atgaaaattcagtgtgatgtgtgtgagaaagcaccagccacagtgatttgttgtgctgatgaggctgccctttgtgaaaaatgtgacatagaagttcatgcagcaaacaagcttgctagcaaacaccaaagacttcttctccagtgcctctccaacaagctgcctccatgcgatatatgccaagaaaaggctgctttcattttctgtgttgaagacagagccctcttttgccgggattgtgatgaaccaatccattcagctggtagcctttcagcaaatcaccagcggtttctggccactggaatccgagtggctttaagctctagttgctccaaggacactcagaagagttctttagagccaccaaatcagagtgaacaacaaacttccaagttgccttggcagcatgcatcgagttttggctcttcttgggctgttgatgattttctacagttctctgacattgaagaatccactgacaaggtaata

SEQ ID NO: 176 - protein, 163 aa, Populus trichocarpa
  Pt_216458, domain coordinates 5-42, 57-94, ortholog of AtBBX24 (G329), AtBBX25 (G1894)
MKIQCDVCEKAPATVICCADEAALCEKCDIEVHAANKLASKHQRLLLQCLSNKLPPCDICQEKAAFIFCVEDRALFCRDCDEPIHSAGSLSANHQRFLATGIRVALSSSCSKDTQKSSLEPPNQSEQQTSKLPWQHASSFGSSWAVDDFLQFSDIEESTDKVI

SEQ ID NO: 177 - DNA, 1475 bp, Populus trichocarpa
  Pt_827145, ortholog of AtBBX24 (G329), AtBBX25 (G1894)
ctctgagccttatctgcacacactcagcttcttggtttctccaccaaacactcctctttctgtatcttccacagattcttgcttgcattatacagtacttcacaaagctcccatctcccatttctattattataccttctcatagtttttcctctcttcttctgttctttcctttttcttcgtggccaaactctttctttctcttgttgtttcgccagtagtttcttggggaaaagattattatcatttcaggctgttttttgagctactttgaaacatatgtttcactgtctcatttactgtatgctgagttcacttaaaaggtagagagaaactggagaaggtgtaaccaagtggggatctgctaaaagagaggaggaggtttggtctgttttaagcaagatgaagattcagtgtgatgtgtgtgagaaagcacccgccacagtgatttgttgtgctgatgaggctgcactttgtgctaaatgtgacatagaagttcatgcagcaaacaagcttgctagcaagcaccaaaggcttcttctccagtgcctctccaacaagctgcctccatgtgatatatgccaagagaaggcagctttcattttctgtgttgaagacagggccctcttttgccgggattgtgatgaaccaatccattcagctggtagcctttctgcgaatcaccagcggtttctggccactggaatccgagtggctttaagctcgagttgctccaaggacacgcagacgaattcttcagggccaccaaatcagagcgcacagcaaactcccatgaaaatccctgcacagcaaacatcgagcttcgccacttcatgggcagttgatgacttgctacagttttccgagtttgaatcatccactgacaagaaagagcaacttgagttaggagagtttgagtggctagctgacatgggtcttttcggtgagcaacttcctcaagaagctctagcagcagctgaagttcctcaactgccaatctcaccaccaaccaatgtgaactcatgcagacccaccaaatccagcatgccccataagaagcctagaattgaaatctcagacgatgacgacgagtacttaactgtgcctgatcttggctgaacttggggtgttgaactcagcacttttgagttcaacttttaaggaactatacatgctttctctaagttcccgtaggcattgatgtatgtatatactatatagtatgtatttgcatacacgggcatgaaactctgcattttaaggactagagagtagcatcacagtcagctctggggattcattttccatgttatcctatatattgttatttttgttagttcttttttccatttgaaagagcaatcacatcaatcagtgctcttgattgtaatagctcaatgtatgattctcagctattgcatgtatatctgtgtgccaggatattactagctgcaagtatatggattgtttctcgc

SEQ ID NO: 178 - protein, 238 aa, Populus trichocarpa
  Pt_827145, domain coordinates 5-42, 57-94, ortholog of AtBBX24 (G329), AtBBX25 (G1894)
MKIQCDVCEKAPATVICCADEAALCAKCDIEVHAANKLASKHQRLLLQCLSNKLPPCDICQEKAAFIFCVEDRALFCRDCDEPIHSAGSLSANHQRFLATGIRVALSSSCSKDTQTNSSGPPNQSAQQTPMKIPAQQTSSFATSWAVDDLLQFSEFESSTDKKEQLELGEFEWLADMGLFGEQLPQEALAAAEVPQLPISPPTNVNSCRPTKSSMPHKKPRIEISDDDDEYLTVPDLG

SEQ ID NO: 179 - DNA, 813 bp, Oryza sativa
  Os02g39360.1, ortholog of AtBBX24 (G329), AtBBX25 (G1894)
atgaagatccagtgcgacgcgtgcgagagcgcggcggcggcggtggtgtgctgcgcggacgaggcggcgctgtgcgcggcgtgcgacgtggaggtgcacgcggcgaacaagctggccgggaagcaccagcggctgccgctggaggcgctctcggcgaggctcccgcgctgcgacgtgtgccaggagaaggcggcgttcatcttctgcgtggaggaccgcgcgctcttctgccgcgactgcgacgagcccatccacgtccccggcacgctctccggcaaccaccagcgctacctcgccaccggcatccgcgtcggcttcgcctccgcctcgccctgcgacggcggcagcgacgcccatgactccgaccaccacgccccgcccatgggctcctccgagcatcatcaccatcatcagcagccggccccgaccgtcgccgtcgacacgccctcgccgcagttcctgccgcagggctgggccgtcgacgagctcctccagttctccgactacgagaccggcgacaagctgcagaaggagtcgtcgccgccgctcgggttccaggagctggagtggttcgccgacatcgacctgttccacaaccaggcgcccaagggcggcgccgccgccggccggacgacggcggaggtccccgagctcttcgcttcgcaggcggccaacgacgtggcgtactacaggccgccgaccaggaccgccgccgccgccttcaccgcggccaccggcttccgccagagcaagaaggcccgcgtcgagctccccgacgacgaggaggattacctcatcgtccctgatcttggt

SEQ ID NO: 180 - protein, 271 aa, Oryza sativa
  Os02g39360.1, domain coordinates 5-42, 57-94, ortholog of AtBBX24 (G329), AtBBX25 (G1894)
MKIQCDACESAAAAVVCCADEAALCAACDVEVHAANKLAGKHQRLPLEALSARLPRCDVCQEKAAFIFCVEDRALFCRDCDEPIHVPGTLSGNHQRYLATGIRVGFASASPCDGGSDAHDSDHHAPPMGSSEHHHHHQQPAPTVAVDTPSPQFLPQGWAVDELLQFSDYETGDKLQKESSPPLGFQELEWFADIDLFHNQAPKGGAAAGRTTAEVPELFASQAANDVAYYRPPTRTAAAAFTAATGFRQSKKARVELPDDEEDYLIVPDLG

SEQ ID NO: 181 - DNA, 771 bp, Oryza sativa
  Os04g41560.2, ortholog of AtBBX24 (G329), AtBBX25 (G1894)
atgaggatccagtgcgacgcgtgcgaggccgcggcggccacggtggtgtgctgcgcggacgaggcggcgctgtgcgcgcgctgcgacgtcgagatccacgccgccaacaagctcgccagcaagcaccagcgcctcccgctcgacgccgcgctccccgccgccctcccgcgctgcgacgtctgccaggagaaggcggcgttcatcttctgcgtggaggacagggcgctcttctgccgggactgcgacgagcccatccacgtcccggggacgctctccggcaaccaccagcgctacctcaccaccggcatccgcgtcgggttcagctccgtctgtagcgccaacgccgaccacctcccgccgccagcgcccaaggggaactccaagccgccggcaagcggcatcgctgctgctgctgctcccaagccggccgtgtccgcggcggcgcaggaggtgccgtcgtcaccgttcttgccgccgtcgggctgggccgtcgaggatctcctgcagctctccgactacgagtccagcgacaagaagggctctcctattgggttcaaggatctggagtggctcgatgacatcgacctgttccatgtccagtcgccggccaagggaggcagcacggcggcggaggtgcctgagctcttcgcctcgccgcagccagcgagcaacatggggctctacaaggcgagcggtgcacgccaaagcaagaagccacgggtggagatacccgatgacgacgaggacttcttcatcgttcctgatcttgga

SEQ ID NO: 182 - protein, 257 aa, Oryza sativa
  Os04g41560.2, domain coordinates 5-42, 58-95, ortholog of AtBBX24 (G329), AtBBX25 (G1894)
MRIQCDACEAAAATVVCCADEAALCARCDVEIHAANKLASKHQRLPLDAALPAALPRCDVCQEKAAFIFCVEDRALFCRDCDEPIHVPGTLSGNHQRYLTTGIRVGFSSVCSANADHLPPPAPKGNSKPPASGIAAAAAPKPAVSAAAQEVPSSPFLPPSGWAVEDLLQLSDYESSDKKGSPIGFKDLEWLDDIDLFHVQSPAKGGSTAAEVPELFASPQPASNMGLYKASGARQSKKPRVEIPDDDEDFFIVPDLG

SEQ ID NO: 183 - DNA, 543 bp, Oryza sativa
  Os04g41560.4, ortholog of AtBBX24 (G329), AtBBX25 (G1894)
atgaggatccagtgcgacgcgtgcgaggccgcggcggccacggtggtgtgctgcgcggacgaggcggcgctgtgcgcgcgctgcgacgtcgagatccacgccgccaacaagctcgccagcaagcaccagcgcctcccgctcgacgccgcgctccccgccgccctcccgcgctgcgacgtctgccaggagaaggcggcgttcatcttctgcgtggaggacagggcgctcttctgccgggactgcgacgagcccatccacgtcccggggacgctctccggcaaccaccagcgctacctcaccaccggcatccgcgtcgggttcagctccgtctgtagcgccaacgccgaccacctcccgccgccagcgcccaaggggaactccaagccgccggcaagcggcatcgctgctgctgctgctcccaagccggccgtgtccgcggcggcgcaggaggtgccgtcgtcaccgttcttgccgccgtcgggctgggccgtcgaggatctcctgcagctctccgactacgagtccagcgacaaggcaaggacc

SEQ ID NO: 184 - protein, 181 aa, Oryza sativa
  Os04g41560.4, domain coordinates 5-42, 58-95, ortholog of AtBBX24 (G329), AtBBX25 (G1894)
MRIQCDACEAAAATVVCCADEAALCARCDVEIHAANKLASKHQRLPLDAALPAALPRCDVCQEKAAFIFCVEDRALFCRDCDEPIHVPGTLSGNHQRYLTTGIRVGFSSVCSANADHLPPPAPKGNSKPPASGIAAAAAPKPAVSAAAQEVPSSPFLPPSGWAVEDLLQLSDYESSDKART

SEQ ID NO: 185 - DNA, 714 bp, Glycine max
  Glyma11g13570.1, ortholog of AtBBX24 (G329), AtBBX25 (G1894)
atgaagattcagtgtgatgtgtgtgagaaagcccctgcaaccgtgatttgttgcgcagatgaggcagctttgtgtgccaaatgtgacgttgaagttcatgctgcaaacaagcttgcaagcaagcaccagaggcttctccttcaatgtctatcaaacaagcttcccagatgtgacatatgccaagataagccagctttcatattttgtgttgaggacagagcactcttctgtaaagactgtgatgagccaattcatttagccagtagcctttctgcaaaccaccagcgcttcctcgctactggtatcagggtggctttgggttctaattgcaccaaaggccatgaaaaaggtaacatggaaccatctaatccaaatgcacaagaagttcctgtgaaaactccttctcagcaagtgcctagcttcacatcctcttgggcagttgatgacttgttggaattaacagactttgaatcgccagacaaaaagcaatccctggaatttggagaacttgaatggctagcagatgcaggccttttcagtgaacagtttcctcatgaagctttagtcgcagctgaagttcctcagcttccagtgccacacactagcagtgttgcctcacataaagcccccaaatccttggtgtcttacaaaaagcctaggattgaagtcctggatgaagatgatgatgaacactgcactgtcccggatctcgga

SEQ ID NO: 186 - protein, 238 aa, Glycine max
  Glyma11g13570.1, domain coordinates 5-42, 57-94, ortholog of AtBBX24 (G329), AtBBX25 (G1894)
MKIQCDVCEKAPATVICCADEAALCAKCDVEVHAANKLASKHQRLLLQCLSNKLPRCDICQDKPAFIFCVEDRALFCKDCDEPIHLASSLSANHQRFLATGIRVALGSNCTKGHEKGNMEPSNPNAQEVPVKTPSQQVPSFTSSWAVDDLLELTDFESPDKKQSLEFGELEWLADAGLFSEQFPHEALVAAEVPQLPVPHTSSVASHKAPKSLVSYKKPRIEVLDEDDDEHCTVPDLG

SEQ ID NO: 187 - DNA, 714 bp, Glycine max
  Glyma12g05570.1, ortholog of AtBBX24 (G329), AtBBX25 (G1894)
atgaaaattcagtgcgatgtgtgtgagaaagccccggcaaccgtgatttgctgcgcagatgaggcagctttgtgtgccaaatgtgacgttgaagttcatgctgcaaacaagcttgcaagcaagcaccagaggcttctccttcaatctttatctaacaagcttcccagatgtgacatatgtcaagataagccagctttcatattttgtgttgaggacagagcactcttctgtaaagactgtgatgaacctattcatttagccagtagcctttctgcaaaccaccagcgcttccttgctactggtatccgggtggctttgggttctaattgcaccaaaggcaatgaaaaaggtcacgtggaaccatctaaaccaaaagcacaagaagttcctgcgaaaattccttctcagcaagtgcctagcttcacatcctcttgggcagttgatgacttgttggaattaacagactttgaatcaccagacaaagttcagaagcaatcccttgagtttggagaacttgaatggctagcagatgtaggcctttttggtgaacagtttcctcatgaagctttagcggcggctgaagttcctcagcttccaatgactagcagtgttggctcacacaaagcccccaaatccttgttgtcttacaaaaagcctaggattgaagtcctagatgaagatgatgatgagcacttcaccgtaccagatctcgga

SEQ ID NO: 188 - protein, 238 aa, Glycine max
  Glyma12g05570.1, domain coordinates 5-42, 57-94, ortholog of AtBBX24 (G329), AtBBX25 (G1894)
MKIQCDVCEKAPATVICCADEAALCAKCDVEVHAANKLASKHQRLLLQSLSNKLPRCDICQDKPAFIFCVEDRALFCKDCDEPIHLASSLSANHQRFLATGIRVALGSNCTKGNEKGHVEPSKPKAQEVPAKIPSQQVPSFTSSWAVDDLLELTDFESPDKVQKQSLEFGELEWLADVGLFGEQFPHEALAAAEVPQLPMTSSVGSHKAPKSLLSYKKPRIEVLDEDDDEHFTVPDLG

SEQ ID NO: 189 - DNA, 717 bp, Glycine max
  Glyma13g41980.1, ortholog of AtBBX24 (G329), AtBBX25 (G1894)
atgaaaattcagtgtgatgtgtgtgagagagctccggcaacagtgatttgttgtgcggatgaggcagctttgtgtgccaaatgtgacgttgaagttcatgctgcaaacaagcttgcaagcaagcaccaaaggcttcttcttcaatgtctatcaagcaagcttccaagatgtgacatttgccaagacaagccagcattcatattttgtgttgaagacagagcactcttctgtcaggattgtgatgaaccaattcattcagccggaagcctttctgcgaaccaccagcgcttccttgctactggtatccgagtggcatcgagttctaattgcaccaaggacaatgaaaaaagtcacttggagcctcctactaggaatgcacaacaagtttctgcgaaaattcctcctcagcaagtgcctagcttcacttcctcttgggctgttgatgacttattggaactaacagcctttgaatcacctgagaaaaaggaatctctgcagtttggagagctggaatggcttacagatgtgggtatttttggtgaacaatttgctcaggaagccttggctgcagctgaagtacctcagcttccagtaactcataacagtagcagtgttgcttcatacagaacttccaaatcctacatgtcccacaaaaagcctaggattgaagtcctaaatgatgatgatgatgagtattttactgtgcctgatcttggc

SEQ ID NO: 190 - protein, 239 aa, Glycine max
  Glyma13g41980.1, domain coordinates 5-42, 57-94, ortholog of AtBBX24 (G329), AtBBX25 (G1894)
MKIQCDVCERAPATVICCADEAALCAKCDVEVHAANKLASKHQRLLLQCLSSKLPRCDICQDKPAFIFCVEDRALFCQDCDEPIHSAGSLSANHQRFLATGIRVASSSNCTKDNEKSHLEPPTRNAQQVSAKIPPQQVPSFTSSWAVDDLLELTAFESPEKKESLQFGELEWLTDVGIFGEQFAQEALAAAEVPQLPVTHNSSSVASYRTSKSYMSHKKPRIEVLNDDDDEYFTVPDLG

SEQ ID NO: 191 - DNA, 606 bp, Glycine max
  Glyma13g41980.2, ortholog of AtBBX24 (G329), AtBBX25 (G1894)
atggatattgtaataagtttcttagaagtattgctcattttgttctttcctttctcctacatataccaacaggacaagccagcattcatattttgtgttgaagacagagcactcttctgtcaggattgtgatgaaccaattcattcagccggaagcctttctgcgaaccaccagcgcttccttgctactggtatccgagtggcatcgagttctaattgcaccaaggacaatgaaaaaagtcacttggagcctcctactaggaatgcacaacaagtttctgcgaaaattcctcctcagcaagtgcctagcttcacttcctcttgggctgttgatgacttattggaactaacagcctttgaatcacctgagaaaaaggaatctctgcagtttggagagctggaatggcttacagatgtgggtatttttggtgaacaatttgctcaggaagccttggctgcagctgaagtacctcagcttccagtaactcataacagtagcagtgttgcttcatacagaacttccaaatcctacatgtcccacaaaaagcctaggattgaagtcctaaatgatgatgatgatgagtattttactgtgcctgatcttggc

SEQ ID NO: 192 - protein, 202 aa, Glycine max
  Glyma13g41980.2, domain coordinates 24-57, ortholog of AtBBX24 (G329), AtBBX25 (G1894)
MDIVISFLEVLLILFFPFSYIYQQDKPAFIFCVEDRALFCQDCDEPIHSAGSLSANHQRFLATGIRVASSSNCTKDNEKSHLEPPTRNAQQVSAKIPPQQVPSFTSSWAVDDLLELTAFESPEKKESLQFGELEWLTDVGIFGEQFAQEALAAAEVPQLPVTHNSSSVASYRTSKSYMSHKKPRIEVLNDDDDEYFTVPDLG

SEQ ID NO: 193 - DNA, 603 bp, Glycine max
  Glyma13g41980.3, ortholog of AtBBX24 (G329), AtBBX25 (G1894)
atggatattgtaataagtttcttagaagtattgctcattttgttctttcctttctcctacatataccaacaggacaagccagcattcatattttgtgttgaagacagagcactcttctgtcaggattgtgatgaaccaattcattcagccggaagcctttctgcgaaccaccagcgcttccttgctactggtatccgagtggcatcgagttctaattgcaccaaggacaatgaaaaaagtcacttggagcctcctactaggaatgcacaacaagtttctgcgaaaattcctcctcagcaagtgcctagcttcacttcctcttgggctgttgatgacttattggaactaacagcctttgaatcacctgagaaagaatctctgcagtttggagagctggaatggcttacagatgtgggtatttttggtgaacaatttgctcaggaagccttggctgcagctgaagtacctcagcttccagtaactcataacagtagcagtgttgcttcatacagaacttccaaatcctacatgtcccacaaaaagcctaggattgaagtcctaaatgatgatgatgatgagtattttactgtgcctgatcttggc

SEQ ID NO: 194 - protein, 201 aa, Glycine max
  Glyma13g41980.3, domain coordinates 24-57, ortholog of AtBBX24 (G329), AtBBX25 (G1894)
MDIVISFLEVLLILFFPFSYIYQQDKPAFIFCVEDRALFCQDCDEPIHSAGSLSANHQRFLATGIRVASSSNCTKDNEKSHLEPPTRNAQQVSAKIPPQQVPSFTSSWAVDDLLELTAFESPEKESLQFGELEWLTDVGIFGEQFAQEALAAAEVPQLPVTHNSSSVASYRTSKSYMSHKKPRIEVLNDDDDEYFTVPDLG

SEQ ID NO: 195 - DNA, 720 bp, Glycine max
  Glyma15g03400.1, ortholog of AtBBX24 (G329), AtBBX25 (G1894)
atgaaaattcagtgtgacgtgtgtgagagagctccagcaacagtgatttgttgcgcggatgaggctgctttgtgtgccaaatgtgacgttgaagttcatgctgcaaacaagcttgcaagcaagcaccaaagacttcttcttcaatgtctatcaagcaagcttcccacatgtgacatttgccaagacaagccagcattcatattttgtgttgaagacagagcactcttctgtcaggattgtgatgaaccaattcattcagccggaagcctttccgcgaaccaccagcgcttccttgctactggtatccgagtggcctcgagttctaattgcaccaaagacaatgaaaaaagtcactcggagcctcctaataggagtgcacaacaagtttctgcgaaaattcctcctcagcaagtgcctagcttcacatcctcttgggctgttgatgacttattggaactaacaggctttgaatcacctgagaaaaaggaatctctgcagtttggagagctggaatggcttacagatgtgggtattttcggcgaacaatttgctcaggaagccttggctgcagctgaagtacctcagcttcccgaaactcataacagtagcagtgttgcttcatacaaaacctccaaatcctacatgtcccacaaaaagcctaggattgaagtcctaaatgatgatgatgatgatgagtattttactgtgcccgatctcggc

SEQ ID NO: 196 - protein, 240 aa, Glycine max
  Glyma15g03400.1, domain coordinates 5-42, 57-94, ortholog of AtBBX24 (G329), AtBBX25 (G1894)
MKIQCDVCERAPATVICCADEAALCAKCDVEVHAANKLASKHQRLLLQCLSSKLPTCDICQDKPAFIFCVEDRALFCQDCDEPIHSAGSLSANHQRFLATGIRVASSSNCTKDNEKSHSEPPNRSAQQVSAKIPPQQVPSFTSSWAVDDLLELTGFESPEKKESLQFGELEWLTDVGIFGEQFAQEALAAAEVPQLPETHNSSSVASYKTSKSYMSHKKPRIEVLNDDDDDEYFTVPDLG

SEQ ID NO: 197 - DNA, 699 bp, Solanum lycopersicum
  AAS67368.1, ortholog of AtBBX24 (G329), AtBBX25 (G1894)
atgaagatacagtgtgatgtgtgtgagaaagctcaagctactgtgatttgctgtgctgatgaggctgctctgtgtgcaaaatgtgatattgaagttcatgctgctaataaattagcaagcaagcaccaaaggcttcatcttcagtgcctatctaacaagcttcctccttgtgatatttgccaagataaagcagccttcatcttctgtgttgaggatagagctctcttttgcaaggactgtgacgaagcaattcattcagccagcagcctcgctaagaaccaccaacgcttcttagccactggaatccgtgtagccttgagctcaagctgtaataaggaatcagtaaaaaaccaactgcagccacaaccacctcagcagaattcccaacaagttggcttgaaaatgcctccacagcagttgtcctgtataacatcaccatcttggcctgtcgatgatttactaggatttccagattatgagtcgagtgacaagaaggatctacttgagcttggtgaatttgagtggttagggggcattgatctctttggtgaacaaacagcagctgaagtgcccgagctatcagtacctcagtcgagcaatacaaatatttacaggacaaccaaatatcaaatgccttacaagaagtccagaattgaaatcccagatgatgatgagtattttactgtccccgatcttggt

SEQ ID NO: 198 - protein, 233 aa, Solanum lycopersicum
  AAS67368.1, domain coordinates 5-42, 57-94, ortholog of AtBBX24 (G329), AtBBX25 (G1894)
MKIQCDVCEKAQATVICCADEAALCAKCDIEVHAANKLASKHQRLHLQCLSNKLPPCDICQDKAAFIFCVEDRALFCKDCDEAIHSASSLAKNHQRFLATGIRVALSSSCNKESVKNQLQPQPPQQNSQQVGLKMPPQQLSCITSPSWPVDDLLGFPDYESSDKKDLLELGEFEWLGGIDLFGEQTAAEVPELSVPQSSNTNIYRTTKYQMPYKKSRIEIPDDDEYFTVPDLG

SEQ ID NO: 199 - DNA, 549 bp, Arabidopsis thaliana
  AtBBX19 (G902), AT4G38960.1, paralog of AtBBX18 (G1881)
atgcggattttgtgcgatgcttgcgagaacgcagccgcaatcatcttttgcgccgccgatgaagctgccctttgtcgcccctgcgatgaaaaagttcatatgtgcaacaagctagctagtcggcatgtacgtgttggtttagctgaaccaagcaatgccccatgctgtgatatatgcgaaaatgcacctgccttcttttactgtgagatagacggtagttctctttgtctgcaatgtgacatggtagtacatgttggtggcaagagaacacacggtcggtttcttttgctgagacagagaatcgagtttccaggggataagcctaaagaaaacaatacgagggacaatttgcagaaccaaagagtctctacaaatggaaatggtgaagccaatgggaagattgatgacgaaatgattgatctaaatgctaatccacaaagagtacatgagccatcatcaaataacaacgggattgatgtaaataacgagaacaatcacgagcctgcaggccttgtaccagttggaccctttaaacgagagtctgagaag

SEQ ID NO: 200 - protein, 183 aa, Arabidopsis thaliana
  AtBBX19 (G902), AT4G38960.1, domain coordinates 5-42, 56-84, paralog of AtBBX18 (G1881)
MRILCDACENAAAIIFCAADEAALCRPCDEKVHMCNKLASRHVRVGLAEPSNAPCCDICENAPAFFYCEIDGSSLCLQCDMVVHVGGKRTHGRFLLLRQRIEFPGDKPKENNTRDNLQNQRVSTNGNGEANGKIDDEMIDLNANPQRVHEPSSNNNGIDVNNENNHEPAGLVPVGPFKRESEK

SEQ ID NO: 201 - DNA, 516 bp, Arabidopsis thaliana
  AtBBX18 (G1881), AT2G21320.1, paralog of AtBBX19 (G902)
atgcgaattttgtgtgatgcttgtgagagcgccgccgctatcgtcttttgcgccgccgacgaagctgccctctgttgctcctgcgacgaaaaagttcataagtgcaacaagctggctagtcggcatcttcgtgtaggcttagctgatccgagtaatgcaccaagctgtgacatatgcgaaaatgcacccgcattcttttactgtgagatagatggtagttccctttgtctacaatgtgatatggtggtacatgttggtgggaagagaacacataggcggtttctattactgagacagagaattgagtttccaggcgataagcctaatcatgctgaccaactgggactacggtgtcaaaaggcttcctctggtcgtggtcaagaatcaaatgggaatggtgatcatgatcataatatgatcgatcttaactccaatcctcaaagagtacacgagcctggatcacataaccaagaggagggtattgatgtaaataacgcaaacaatcacgagcatgaa

SEQ ID NO: 202 - protein, 172 aa, Arabidopsis thaliana
  AtBBX18 (G1881), AT2G21320.1, domain coordinates 5-42, 56-92, paralog of AtBBX19 (G902)
MRILCDACESAAAIVFCAADEAALCCSCDEKVHKCNKLASRHLRVGLADPSNAPSCDICENAPAFFYCEIDGSSLCLQCDMVVHVGGKRTHRRFLLLRQRIEFPGDKPNHADQLGLRCQKASSGRGQESNGNGDHDHNMIDLNSNPQRVHEPGSHNQEEGIDVNNANNHEHE

SEQ ID NO: 203 - DNA, 618 bp, Zea mays
  ACF85933.1, ortholog of AtBBX19 (G902), AtBBX18 (G1881)
atgcggacgatctgcgatgtgtgcgagagcgcaccggcggtgctcttctgtgcggccgacgaggcagcgctttgccggccctgcgacgagaaggtacacatgtgtaacaagcttgctagtcggcatgtgagagttggacttgcagaccctaataaacttgtccggtgtgatatatgtgaaaattcacccgctttcttctactgtgagatagacggcacctcactttgcctgagctgtgatatgactgttcatgttggtggcaagcgaacccatggaagatacctgctcctaaggcaaagggttgaatttccaggagataaaccgggccatatggatgacgtgcctatggaaatccaagatcctgaaaaccagagagaccagaaaaagccacccaaggagcaaacggcaaaccaccataacggcgatgatccggccactgatggcaactgtgatgaccagggtaacattgattcaaaaatgatcgatcttaatatgcgcccggttcgtactcatgggcaagaatcaaattcccagactcagggggtaggtcttagtgtgaacaaccatgactctccaggggtggtgccaacaagcaattccgaaagagacaccagcaag

SEQ ID NO: 204 - protein, 206 aa, Zea mays
  ACF85933.1, domain coordinates 5-42, 56-84, ortholog of AtBBX19 (G902), AtBBX18 (G1881)
MRTICDVCESAPAVLFCAADEAALCRPCDEKVHMCNKLASRHVRVGLADPNKLVRCDICENSPAFFYCEIDGTSLCLSCDMTVHVGGKRTHGRYLLLRQRVEFPGDKPGHMDDVPMEIQDPENQRDQKKPPKEQTANHHNGDDPATDGNCDDQGNIDSKMIDLNMRPVRTHGQESNSQTQGVGLSVNNHDSPGVVPTSNSERDTSK

SEQ ID NO: 205 - DNA, 618 bp, Zea mays; identical to SEQ ID NO: 203
  ACG27957.1, ortholog of AtBBX19 (G902), AtBBX18 (G1881)

SEQ ID NO: 206 - protein, 206 aa, Zea mays; identical to SEQ ID NO: 204
  ACG27957.1, domain coordinates 5-42, 56-84, ortholog of AtBBX19 (G902), AtBBX18 (G1881)

SEQ ID NO: 207 - DNA, 615 bp, Zea mays
  ACL52378.1, ortholog of AtBBX19 (G902), AtBBX18 (G1881)
atgcggacgatctgcgatgtgtgcgagagcgcaccggcggtgctcttctgtgcggccgacgaggctgcgctttgccggccttgcgacgagaaggtacacatgtgcaacaagcttgctagtcggcatgtgagagttgggcttgcagaccctaataaactggcacgttgtgatatatgcgagaattcacctgctttcttctactgtgagatagatggcacctcactttgcctgagctgtgatatgactgttcatgttggtggcaaaagaacccatggtagatacctgctcctaaggcaaagggttgaatttccaggagataaaccgggccatatggatgacgtgcctatggagatcaaagatcctgaaaaccagagagagcaaaacacgcccaaggagcaaatggcaaaccaccataacgtcaatgatccagtctctgatggcaattgcgatggccagggtaacattgattcgaaaatgatcgatcttaatatgcgcccggctcgtactcatgggcaaggatcaaattcccagactcagggggtggatcttagtgtgaacaaccatgactctccaggggtggtgccaacaagtaattccgaaagagacgccatcaag

SEQ ID NO: 208 - protein, 205 aa, Zea mays
  ACL52378.1, domain coordinates 5-42, 56-88, ortholog of AtBBX19 (G902), AtBBX18 (G1881)
MRTICDVCESAPAVLFCAADEAALCRPCDEKVHMCNKLASRHVRVGLADPNKLARCDICENSPAFFYCEIDGTSLCLSCDMTVHVGGKRTHGRYLLLRQRVEFPGDKPGHMDDVPMEIKDPENQREQNTPKEQMANHHNVNDPVSDGNCDGQGNIDSKMIDLNMRPARTHGQGSNSQTQGVDLSVNNHDSPGVVPTSNSERDAIK

SEQ ID NO: 209 - DNA, 618 bp, Zea mays; identical to SEQ ID NO: 203
  NP_001141274.1, ortholog of AtBBX19 (G902), AtBBX18 (G1881)

SEQ ID NO: 210 - protein, 206 aa, Zea mays; identical to SEQ ID NO: 204
  NP_001141274.1, domain coordinates 5-42, 56-84, ortholog of AtBBX19 (G902), AtBBX18 (G1881)

SEQ ID NO: 211 - DNA, 1346 bp, Populus trichocarpa
  Pt_648693, ortholog of AtBBX19 (G902), AtBBX18 (G1881)
aacagaaggcaggcaaagcaagcgacgaatatcactccattttcctttcttcttcatcgtccccagtttcttagactcataaacaagtcctgttgtatgctctcatcccctctcctctcctctcctctccttttcaccatttaaatctccctctccagtctgtttgtcattgactgtttaacttaataataatcttaatctcatgaaatattgacaaatggtgatgagaaggagaaaggagaaataatagaaagtagagattgaaaggtgacaggacagtgacaataataaagaaagaaccaaaactgattctaaaaaacggaaatgcgaatgctttgtgatgtgtgtgaaagcgcagctgcgattcttttctgtgctgctgatgaagccgcgctttgccgctcctgcgacgagaaggttcatatgtgtaacaagctagctagtcggcatgtacgagtaggacttgcagatcctagtgatgttccacagtgtgacatatgtgaaaaggcaccagctttcttttactgcgagatagatggcagttcgctctgcttgcaatgtgatatgatagtgcatgttggtggtaaaaggacccatgggagatatctcctgttgaggcagagagttgagtttccaggggataaacctggctgtacagaggaacaaggacagcaaccgcttgatgataatgaaacaagaagggaccaaaatcagccgcctaagctcacagctagagaaaatcaacagaaccacagggcctctccagttccaatggtagagaataacactgatagtgacgggaaaatggacaacaaattgattgatcttaatgccaggcctcagcgtgtacatgggaaaaatccaactaaccaggaaaaccatgaatcctctagtttggctccttttggattctttaaaggggagccacaaaagtaagcaaggtatgatctgcatttagtaagcctaactcgtgttttcttttctccatttattgtttcataaagttgacattatggatggttgtgcgggaagcttcaagtttccattgaagtcgattttcttaaaccagctcttggatgacttctacatgcaaatatgcataggactctaaattccgctgcttgtaagatggtgaatgtaatcttcttttattcaaactgtggtttaaatatgtagctatatggatctgcaatgaagataaacaaatgttgttatggccttttaccgtgttccatgtttgtaagggcataacaaactgtggtttaaatatatagctatatggattctcaaaagaacaaaaagggcacatctgttattgagatggagcctagctgaaatttactata

SEQ ID NO: 212 - protein, 203 aa, Populus trichocarpa
  Pt_648693, domain coordinates 5-42, 56-88, ortholog of AtBBX19 (G902), AtBBX18 (G1881)
MRMLCDVCESAAAILFCAADEAALCRSCDEKVHMCNKLASRHVRVGLADPSDVPQCDICEKAPAFFYCEIDGSSLCLQCDMIVHVGGKRTHGRYLLLRQRVEFPGDKPGCTEEQGQQPLDDNETRRDQNQPPKLTARENQQNHRASPVPMVENNTDSDGKMDNKLIDLNARPQRVHGKNPTNQENHESSSLAPFGFFKGEPQK

SEQ ID NO: 213 - DNA, 996 bp, Populus trichocarpa
  Pt_721866, ortholog of AtBBX19 (G902), AtBBX18 (G1881)
atgcgaacgatttgtgacgtgtgtgagagcgcagccgcgattcttttttgtgcagctgatgaagccgctctttgccgttcctgtgacgagaaggttcatttgtgcaacaagctagctagtcggcacgtgcgagtaggacttgcagatcctagcgctgttccacagtgtgacatatgtgaaaatgcaccagctttcttttactgtgagatagatggtagttcgctctgcttgcaatgcgatatgatagtacatgttggtggtaaaagaacccatggtagatatctcctgttgaggcagagggttgagtttccaggggataaacctggccggatggaggagcaaggacaacaacctcttgatcataatgaaacaaggagggaccaaaaccagccacttaaactcacagctagagaaaataaacaaaaccacagagcctctccagttccaatggtagagaataacacagatagcgacggaaaaatggacaacaatttgattgatcttaatgccaggcctcagcggatacatggacaaaattcaactaaccaggaaaatcacgaatcttctagtgcggttcctgttggatccttcaaaagagagcctcaaaagtaagcaaggtgatttcggatgcatgttgagatattcagtactgcaaccagccttgtctgctcttgcacttgcagcatttcttgtggttaggctttccttcctagcgcgaagttggtgaggtgatttttagtcttttgtatcaaatatcaatagagatatagcttgtgtgaaagaaataacaagactctttgttggttagcatttggctcatgtgctggcttgagttcaccatcaccttcaggtcctgagatttataatttaataaagcacgattcattctaaagatgatgatgtgaagcgaccttcggacaggagaaagtggcttctgtcgtcgttattattttgtttttttggtcagaaatataaaaaaaatccacttttaaaaaa

SEQ ID NO: 214 - protein, 203 aa, Populus trichocarpa
  Pt_721866, domain coordinates 5-42, 56-88, ortholog of AtBBX19 (G902), AtBBX18 (G1881)
MRTICDVCESAAAILFCAADEAALCRSCDEKVHLCNKLASRHVRVGLADPSAVPQCDICENAPAFFYCEIDGSSLCLQCDMIVHVGGKRTHGRYLLLRQRVEFPGDKPGRMEEQGQQPLDHNETRRDQNQPLKLTARENKQNHRASPVPMVENNTDSDGKMDNNLIDLNARPQRIHGQNSTNQENHESSSAVPVGSFKREPQK

SEQ ID NO: 215 - DNA, 1073 bp, Populus trichocarpa
  Pt_741179, ortholog of AtBBX19 (G902), AtBBX18 (G1881)
ttatgtccctctctttctatcaccaccaacaacaaaaacattaacatttgatagacagcgtaaaaatcaaatagtgaagctgtgtcttgttgtggtgtttgttatctttattaaaagaaactgtacgtaaatattttttctattttcttgattttggagaaatgagagtgagagataattaattatgcgtaccctttgtgacgcttgtgaaagtgcttttgctattgttttctgtgctgctgatgaggccgcactttgccttgcctgcgataagaaggttcatatgtgcaacaaacttgcgagcaggcatgttcgagtgggtctggcgaatcccagtgaagttcctcgttgtgatatatgtgaaaatgcacctgctttcttctactgtgagacagatggaagttccctttgcttgcaatgtgatatgactgttcatgttggaggtaaaagaacacacgggagatatcttctgttgagacaaaaaattgagtttccaggggatcaacctcagcctgaggacccagcaccgcaacctatgtatccaggggagacaagaagaggacagaatcgaccacaaaaggcaacatcaggagagaacagacagaatcgccaagcttctccagttctgatgtcggtcactaattctgatgggcatgacaaggtggataagaatatgattgatttgaatatgaagcctcatcgaattcatgaacatgcttcaaataatcaggaacaataatatttttatattaacggagcggccgcgaagctgaaagcagggttcctatgttgcctggaaagctggagaagagcagggttttttctatgcttctcttatcaagtagttggcatttcatgtttcaatatttcattttcttctcccctgttttcctttgatatggatgatgtgctttaagtcttgcagatggatttttaccaataatgtagtttagttgctagacaagctttggacggtatacacatctattgtgaaaaaacatgcagcaattatagatggatattgtaatagaagagaaactagaaataactgaagatttaatatagttcgaaaa

SEQ ID NO: 216 - protein, 184 aa, Populus trichocarpa
  Pt_741179, domain coordinates 5-42, 56-88, ortholog of AtBBX19 (G902), AtBBX18 (G1881)
MRTLCDACESAFAIVFCAADEAALCLACDKKVHMCNKLASRHVRVGLANPSEVPRCDICENAPAFFYCETDGSSLCLQCDMTVHVGGKRTHGRYLLLRQKIEFPGDQPQPEDPAPQPMYPGETRRGQNRPQKATSGENRQNRQASPVLMSVTNSDGHDKVDKNMIDLNMKPHRIHEHASNNQEQ

SEQ ID NO: 217 - DNA, 1347 bp, Populus trichocarpa
  Pt_820080, ortholog of AtBBX19 (G902), AtBBX18 (G1881)
gctgtgccttgttgcgatgtttgatatctttattaaaggaaactgtacttgaatcctttttcttgttgcttgattttggagaaatgagagtgagagaaaattatgcgtaccctttgcgacgcctgtgagagtgctgctgctattgtcttctgtgctgctgatgaggctgcactttgccttgcctgcgatgagaaggttcatatgtgcaacaaacttgctagcaggcatgtgcgagtgggtctggcaaatcccagtgacgttccacgctgtgacatatgtgaaaatgcacctgctttcttttattgtgagacagatggaagttccctttgcttgcaatgtgatatgactgttcatgttggaggtaaaaggacacatgggagatatcttttgttgagacaaagagttgagtttccaggggataaacctcagcctgatgacctacattcgcaacctatgcatccaggggagacaaggaaaggacagaatcagccaccaaaggcaacagcagaagagaagcgacagaatcgccaggtttctccagctccaatgtcactctctaattctgatggacatgacaaagtggataaaaagatgattgatttgaatatgaagcctcaacgaactgatcacgaacaagcttctaataatcaggaactgtgacattattatgttaatggagcgatcgcaaagctgaaagcacggttcctatgccctcagagagctggacaggagcagggtttcttctatgcttctcttacgtagtacgtagttagcatgtcatgtgtcaatatttcatgttcttctcccctgtttttctttcgacatggatgatgtgcttctaaggcttggggaatgtgttttcacgaataatgtagcttagttgtttagactagcagtggacagtatccacatcttcaattgcaaagaaaaggtatagaatcaagtgcaattggttgctttgtggttgtgttcgagatatttttcttcccatgcatcccttatttccaagtgtctgatattcgcagaagtggcattgtaagaaatttctttggagtctagagaattcggtatactatttcagattactgcaagagcaagtttccagctgttctttgtcttgatttcggatggcgaacgttgtttttgaaagcagacttctgatacatgtcacaacgcttccaacgcaaatcgatagaatcgttacatttgcatgcatgggccatggatctaagctcgctggatttcaagaccagtggcatttcccatttttctgtgaacgcaacttggacacctcctgtcttctgtgtatgtgttgaagaacaataatcagtttattaaccatggttt

SEQ ID NO: 218 - protein, 185 aa, Populus trichocarpa
  Pt_820080, domain coordinates 5-42, 56-88, ortholog of AtBBX19 (G902), AtBBX18 (G1881)
MRTLCDACESAAAIVFCAADEAALCLACDEKVHMCNKLASRHVRVGLANPSDVPRCDICENAPAFFYCETDGSSLCLQCDMTVHVGGKRTHGRYLLLRQRVEFPGDKPQPDDLHSQPMHPGETRKGQNQPPKATAEEKRQNRQVSPAPMSLSNSDGHDKVDKKMIDLNMKPQRTDHEQASNNQEL

SEQ ID NO: 219 - DNA, 633 bp, Oryza sativa
  Os09g35880.1, ortholog of AtBBX19 (G902), AtBBX18 (G1881)
atgcggacgatctgcgacgtgtgcgagagcgcgccggcggtgctcttctgcgtggccgacgaggccgcgctctgccggtcctgcgacgagaaggtgcatatgtgtaacaagcttgctaggcggcacgtgagagttgggcttgcagaccctaataaagttcaacgctgtgatatatgtgaaaatgcccccgccttcttctattgcgagatagatggtacatcactttgccttagttgtgatatgactgttcatgttggtgggaaacgaacccatggaagatacctgctcctaaggcaacgggttgaatttccaggagataaaccaggtcatatggatgatgttgctatgcaacagaaagatcctgaaaaccggacggatcaaaagaaggcccctcactcagtaacaaaggagcaaatggcaaaccatcataatgtgtctgatgatccagcctcagatggcaactgcgatgaccagggtaacatcgattccaaaatgattgatcttaatatgagacccgtccgtactcatggacaaggttcaaactcacagactcagggcgtggatgttagcgtcaacaatcatgattctccaggagtggtgccaacatgtaatttcgaacgagaagccaacaaa

SEQ ID NO: 220 - protein, 211 aa, Oryza sativa
  Os09g35880.1, domain coordinates 5-42, 56-88, ortholog of AtBBX19 (G902), AtBBX18 (G1881)
MRTICDVCESAPAVLFCVADEAALCRSCDEKVHMCNKLARRHVRVGLADPNKVQRCDICENAPAFFYCEIDGTSLCLSCDMTVHVGGKRTHGRYLLLRQRVEFPGDKPGHMDDVAMQQKDPENRTDQKKAPHSVTKEQMANHHNVSDDPASDGNCDDQGNIDSKMIDLNMRPVRTHGQGSNSQTQGVDVSVNNHDSPGVVPTCNFEREANK

SEQ ID NO: 221 - DNA, 552 bp, Glycine max
  Glyma01g37370.1, ortholog of AtBBX19 (G902), AtBBX18 (G1881)
atgcgaacgctttgtgatgcttgtgagagcgccgcggctatagttttctgcgccgctgatgaggctgcactttgtcgtgcctgtgatgagaaggttcacatgtgcaacaagctagctagtaggcatgtgagggttggtcttgctagtccaagtgatgtaccacggtgtgacatatgtgagaatgcacctgctttcttctattgcgagacagatggaagttccctttgtttgcagtgtgatatgattgttcatgttggaggtaaaagaacgcatggaagatatcttctgttcaggcaaagagttgagtttccaggagataaatctagtcatgctgaaaatccggcttcacaaccattggaaccaggtgaggctaaaagaggacaaaatccacttcccaaactaaaaatgggagagaagcaacaaaatcacaagatgcctatggttccaacgccaggacctgatgctgatgggcatgccaagatggaaagtaaaatgattgatttgaacatgaagcctaatagaatacatgaacaagcatcaaataatcagcca

SEQ ID NO: 222 - protein, 184 aa, Glycine max
  Glyma01g37370.1, domain coordinates 5-42, 56-88, ortholog of AtBBX19 (G902), AtBBX18 (G1881)
MRTLCDACESAAAIVFCAADEAALCRACDEKVHMCNKLASRHVRVGLASPSDVPRCDICENAPAFFYCETDGSSLCLQCDMIVHVGGKRTHGRYLLFRQRVEFPGDKSSHAENPASQPLEPGEAKRGQNPLPKLKMGEKQQNHKMPMVPTPGPDADGHAKMESKMIDLNMKPNRIHEQASNNQP

SEQ ID NO: 223 - DNA, 579 bp, Glycine max
  Glyma11g07930.1, ortholog of AtBBX19 (G902), AtBBX18 (G1881)
atgcgaacgctttgtgatgcttgtgagagtgcggcggctatagttttctgcgccgctgatgaggctgcactttgtcgtgcctgtgatgagaaggttcacatgtgcaataagctagctagtaggcatgtgagggttggtcttgcaagtccaagtgatgtgccacggtgtgacatatgtgagaatgcaccagctttcttctattgcgagacagatggaagttccctttgtttgcagtgtgatatgattgttcatgttggtggtaaaagaacgcatggaagatatcttctgttcaggcaaagagttgagtttccaggagataaatctagtcatgctgaaaatccggcttcacaagcattggaaccaggtgaggctaaaagaggacaaaatccacttcccaagctaaaaatgggagagaaacaacaaaatcacaggatgcctatggttccaacaccaggacctgatgctgatgggcaaaccaagatggaaactaaaatgattgatttgaacatgaagcctaatagaatacatgaacaagcatcaaataaccagtgcagttggatgaaagtagaaccctttcca

SEQ ID NO: 224 - protein, 193 aa, Glycine max
  Glyma11g07930.1, domain coordinates 5-42, 56-88, ortholog of AtBBX19 (G902), AtBBX18 (G1881)
MRTLCDACESAAAIVFCAADEAALCRACDEKVHMCNKLASRHVRVGLASPSDVPRCDICENAPAFFYCETDGSSLCLQCDMIVHVGGKRTHGRYLLFRQRVEFPGDKSSHAENPASQALEPGEAKRGQNPLPKLKMGEKQQNHRMPMVPTPGPDADGQTKMETKMIDLNMKPNRIHEQASNNQCSWMKVEPFP

SEQ ID NO: 225 - DNA, 552 bp, Glycine max
  Glyma11g07930.2, ortholog of AtBBX19 (G902), AtBBX18 (G1881)
atgcgaacgctttgtgatgcttgtgagagtgcggcggctatagttttctgcgccgctgatgaggctgcactttgtcgtgcctgtgatgagaaggttcacatgtgcaataagctagctagtaggcatgtgagggttggtcttgcaagtccaagtgatgtgccacggtgtgacatatgtgagaatgcaccagctttcttctattgcgagacagatggaagttccctttgtttgcagtgtgatatgattgttcatgttggtggtaaaagaacgcatggaagatatcttctgttcaggcaaagagttgagtttccaggagataaatctagtcatgctgaaaatccggcttcacaagcattggaaccaggtgaggctaaaagaggacaaaatccacttcccaagctaaaaatgggagagaaacaacaaaatcacaggatgcctatggttccaacaccaggacctgatgctgatgggcaaaccaagatggaaactaaaatgattgatttgaacatgaagcctaatagaatacatgaacaagcatcaaataaccagcca

SEQ ID NO: 226 - protein, 184 aa, Glycine max
  Glyma11g07930.2, domain coordinates 5-42, 56-88, ortholog of AtBBX19 (G902), AtBBX18 (G1881)
MRTLCDACESAAAIVFCAADEAALCRACDEKVHMCNKLASRHVRVGLASPSDVPRCDICENAPAFFYCETDGSSLCLQCDMIVHVGGKRTHGRYLLFRQRVEFPGDKSSHAENPASQALEPGEAKRGQNPLPKLKMGEKQQNHRMPMVPTPGPDADGQTKMETKMIDLNMKPNRIHEQASNNQP

SEQ ID NO: 227 - DNA, 552 bp, Glycine max; identical to SEQ ID NO: 225
  Glyma11g07930.3, ortholog of AtBBX19 (G902), AtBBX18 (G1881)

SEQ ID NO: 228 - protein, 184 aa, Glycine max; identical to SEQ ID NO: 226
  Glyma11g07930.3, domain coordinates 5-42, 56-88, ortholog of AtBBX19 (G902), AtBBX18 (G1881)

SEQ ID NO: 229 - DNA, 567 bp, Glycine max
  Glyma11g07930.4, ortholog of AtBBX19 (G902), AtBBX18 (G1881)
atgcgaacgctttgtgatgcttgtgagagtgcggcggctatagttttctgcgccgctgatgaggctgcactttgtcgtgcctgtgatgagaaggttcacatgtgcaataagctagctagtaggcatgtgagggttggtcttgcaagtccaagtgatgtgccacggtgtgacatatgtgagaatgcaccagctttcttctattgcgagacagatggaagttccctttgtttgcagtgtgatatgattgttcatgttggtggtaaaagaacgcatggaagatatcttctgttcaggcaaagagttgagtttccaggagataaatctagtcatgctgaaaatccggcttcacaagcattggaaccaggtgaggctaaaagaggacaaaatccacttcccaagctaaaaatgggagagaaacaacaaaatcacaggatgcctatggttccaacaccaggacctgatgctgatgggcaaaccaagatggaaactaaaatgattgatttgaacatgaagcctaatagaatacatgaacaagcatcaaataaccaggttagagttcatgggaag

SEQ ID NO: 230 - protein, 189 aa, Glycine max
  Glyma11g07930.4, domain coordinates 5-42, 56-88, ortholog of AtBBX19 (G902), AtBBX18 (G1881)
MRTLCDACESAAAIVFCAADEAALCRACDEKVHMCNKLASRHVRVGLASPSDVPRCDICENAPAFFYCETDGSSLCLQCDMIVHVGGKRTHGRYLLFRQRVEFPGDKSSHAENPASQALEPGEAKRGQNPLPKLKMGEKQQNHRMPMVPTPGPDADGQTKMETKMIDLNMKPNRIHEQASNNQVRVHGK

SEQ ID NO: 231 - DNA, 636 bp, Glycine max
  Glyma11g11850.1, ortholog of AtBBX19 (G902), AtBBX18 (G1881)
atgcgaaccctttgcgacgtatgcgagagcgccgctgccattctcttctgcgccgctgatgaggccgctctctgctccgcttgtgaccacaagatccatatgtgtaacaaacttgctagtaggcatgttcgagttggccttgctgaccccactgatgttccacgctgtgacatatgtgaaaatgcacctgctttcttttactgtgagatagatggtagttcgctgtgtctgcaatgtgatatgattgtgcatgttggtggtaaaagaacccatggaagatatcttctattgaggcaaagagctcagtttccaggtgataaacctgcccaaatggaagaactagagctgcaacctatggatcaaaatgaatcgagaagggatgaaagtcagtcactcaagctaaaaacaagagatagtcagcagaatcacagtgtctcaccttttccaaggcaagaaaataatattgatggtcatggaaaaatggataaaaagttaattgatcttaataccaggccactgcggttaaatggatcagcaccaaacaaccaggaacaatgcatggatattttaagaggcaataatcatgaatctgccagtgtgccaccagtagaatccttcaaacaagagtctgagaag

SEQ ID NO: 232 - protein, 212 aa, Glycine max
  Glyma11g11850.1, domain coordinates 5-42, 56-88, ortholog of AtBBX19 (G902), AtBBX18 (G1881)
MRTLCDVCESAAAILFCAADEAALCSACDHKIHMCNKLASRHVRVGLADPTDVPRCDICENAPAFFYCEIDGSSLCLQCDMIVHVGGKRTHGRYLLLRQRAQFPGDKPAQMEELELQPMDQNESRRDESQSLKLKTRDSQQNHSVSPFPRQENNIDGHGKMDKKLIDLNTRPLRLNGSAPNNQEQCMDILRGNNHESASVPPVESFKQESEK

SEQ ID NO: 233 - DNA, 537 bp, Glycine max
  Glyma12g04130.1, ortholog of AtBBX19 (G902), AtBBX18 (G1881)
atgcgaaccctttgcgacgtatgcgagagcgccgctgccattgtcttctgcgccgctgatgaggctgctctctgctccgcttgtgaccacaagatccatatgtgtaacaaacttgctagtagacacgttcgggttggccttgctgaccccactgatgttccacgctgtgacatatgtgaaaacgcacctgctttcttttactgtgagatagatggtagttcgctgtgtctgcaatgtgatatgattgtgcatgttggtggtaaaagaactcatggaagatatcttctattgaggcaaagagttcagtttccatatagtcagcagaatcacagtgtctcacctgttccaagacaagaaaataatattgatggtcatggaaaaatggataaaaagttaattgatcttaatacgaggccactgcggttaaatggagcagcaccaaacaaccaggaacgaggtatggatattttaagaggcaataatcataaatctgcgagtgtgccaccagtagaatccttcaaacaagagtctgagaag

SEQ ID NO: 234 - protein, 179 aa, Glycine max
  Glyma12g04130.1, domain coordinates 5-42, 56-88, ortholog of AtBBX19 (G902), AtBBX18 (G1881)
MRTLCDVCESAAAIVFCAADEAALCSACDHKIHMCNKLASRHVRVGLADPTDVPRCDICENAPAFFYCEIDGSSLCLQCDMIVHVGGKRTHGRYLLLRQRVQFPYSQQNHSVSPVPRQENNIDGHGKMDKKLIDLNTRPLRLNGAAPNNQERGMDILRGNNHKSASVPPVESFKQESEK

SEQ ID NO: 235 - protein, 37 aa, Arabidopsis thaliana
  conserved domain of AtBBX28 (G1481)
CDLCNGVARMYCESDQASLCWDCDGKVHGANFLVAKH

SEQ ID NO: 236 - protein, 37 aa, Arabidopsis thaliana
  conserved domain of AtBBX29 (G900)
CELCCGVARMYCESDQASLCWDCDGKVHGANFLVAKH

SEQ ID NO: 237 - protein, 37 aa, Zea mays
  conserved domain of ACN33981.1
CELCGAAARVYCGADEATLCWGCDAQVHGANFLVARH

SEQ ID NO: 238 - protein, 37 aa, Populus trichocarpa
  conserved domain of Pt_568988
CELCGSSARMYCESDQASLCWDCDEKVHTANFLVAKH

SEQ ID NO: 239 - protein, 37 aa, Populus trichocarpa
  conserved domain of Pt_571834
CELCKNPARTYCESDEANLCWNCDTKVHGANFLVARH

SEQ ID NO: 240 - protein, 37 aa, Populus trichocarpa
  conserved domain of Pt_582065
CELCGSSARMFCESDQASLCWDCDEKVHSANFLVAKH

SEQ ID NO: 241 - protein, 37 aa, Populus trichocarpa
  conserved domain of Pt_758524
CELCDSFAQMHCESDQAILCSACDAYVHSANFLAAKH

SEQ ID NO: 242 - protein, 37 aa, Oryza sativa; identical to SEQ ID NO: 237
  conserved domain of Os08g08120.1

SEQ ID NO: 243 - protein, 37 aa, Oryza sativa; identical to SEQ ID NO: 237
  conserved domain of Os08g08120.2

SEQ ID NO: 244 - protein, 37 aa, Oryza sativa; identical to SEQ ID NO: 237
  conserved domain of Os08g08120.3

SEQ ID NO: 245 - protein, 37 aa, Glycine max
  conserved domain of Glyma06g39810.1
CVLCEKRAMMLCDSDQAKLCWECDEKVHSANFLVAKH

SEQ ID NO: 246 - protein, 37 aa, Glycine max
  conserved domain of Glyma06g45620.1
CELCKVPARIFCESDQASLCWDCDAKVHSANFLVARH

SEQ ID NO: 247 - protein, 37 aa, Glycine max
  conserved domain of G4015
CELCHQLASLYCPSDSAFLCFHCDAAVHAANFLVARH

SEQ ID NO: 248 - protein, 37 aa, Glycine max
  conserved domain of Glyma09g35960.1
CALCKKRAMMLCDSDQAKLCWECDEKVHSANFLVAKH

SEQ ID NO: 249 - protein, 37 aa, Glycine max; identical to SEQ ID NO: 246
  conserved domain of Glyma12g11230.1

SEQ ID NO: 250 - protein, 37 aa, Glycine max
  conserved domain of Glyma12g32470.1
CELCKLPARTFCESDQASLCWDCDAKVHGANFLVARH

SEQ ID NO: 251 - protein, 37 aa, Glycine max
  conserved domain of G4014
CELCNSPAKLFCESDQASLCWKCDAKVHSANFLVTKH

SEQ ID NO: 252 - protein, 37 aa, Glycine max
  conserved domain of G4016
CELCKLPARTFCESDQASLCWDCDAKVHGANFLVERH

SEQ ID NO: 253 - protein, 37 aa, Glycine max
  conserved domain of Glyma15g07140.1
CELCNSPAKLFCESDQASLCWECDAKVHSANFLVTKH

SEQ ID NO: 254 - protein, 38 aa, Arabidopsis thaliana
  conserved domain of AtBBX24 (G329)
CDVCEKAPATVICCADEAALCPQCDIEIHAANKLASKH

SEQ ID NO: 255 - protein, 38 aa, Arabidopsis thaliana
  conserved domain of AtBBX24 (G329)
CDICQEKAAFIFCVEDRALLCRDCDESIHVANSRSANH

SEQ ID NO: 256 - protein, 38 aa, Arabidopsis thaliana
  conserved domain of AtBBX25 (G1894)
CDVCEKAPATLICCADEAALCAKCDVEVHAANKLASKH

SEQ ID NO: 257 - protein, 38 aa, Arabidopsis thaliana
  conserved domain of AtBBX25 (G1894)
CDICLEKAAFIFCVEDRALLCRDCDEATHAPNTRSANH

SEQ ID NO: 258 - protein, 38 aa, Zea mays
  conserved domain of ACF84591.1
CDACEGAAATVVCCADEAALCARCDVEIHAANKLASKH

SEQ ID NO: 259 - protein, 38 aa, Zea mays
  conserved domain of ACF84591.1
CDVCQEKAAFIFCVEDRALFCQDCDEPIHVPGTLSGNH

SEQ ID NO: 260 - protein, 38 aa, Zea mays; identical to SEQ ID NO: 258
  conserved domain of ACF86823.1

SEQ ID NO: 261 - protein, 38 aa, Zea mays
  conserved domain of ACF86823.1
CDVCQEKAAFIFCVEDRALFCRDCDEPIHVPGTLSGNH

SEQ ID NO: 262 - protein, 38 aa, Zea mays; identical to SEQ ID NO: 258
  conserved domain of CAW36812.1

SEQ ID NO: 263 - protein, 38 aa, Zea mays; identical to SEQ ID NO: 261
  conserved domain of CAW36812.1

SEQ ID NO: 264 - protein, 38 aa, Populus trichocarpa
  conserved domain of Pt_216458
CDVCEKAPATVICCADEAALCEKCDIEVHAANKLASKH

SEQ ID NO: 265 - protein, 38 aa, Populus trichocarpa
  conserved domain of Pt_216458
CDICQEKAAFIFCVEDRALFCRDCDEPIHSAGSLSANH

SEQ ID NO: 266 - protein, 38 aa, Populus trichocarpa
  conserved domain of Pt_827145
CDVCEKAPATVICCADEAALCAKCDIEVHAANKLASKH

SEQ ID NO: 267 - protein, 38 aa, Populus trichocarpa; identical to SEQ ID NO: 265
  conserved domain of Pt_827145

SEQ ID NO: 268 - protein, 38 aa, Oryza sativa
  conserved domain of Os02g39360.1
CDACESAAAAVVCCADEAALCAACDVEVHAANKLAGKH

SEQ ID NO: 269 - protein, 38 aa, Oryza sativa; identical to SEQ ID NO: 261
  conserved domain of Os02g39360.1

SEQ ID NO: 270 - protein, 38 aa, Oryza sativa
  conserved domain of Os04g41560.2
CDACEAAAATVVCCADEAALCARCDVEIHAANKLASKH

SEQ ID NO: 271 - protein, 38 aa, Oryza sativa; identical to SEQ ID NO: 261
  conserved domain of Os04g41560.2

SEQ ID NO: 272 - protein, 38 aa, Oryza sativa; identical to SEQ ID NO: 270
  conserved domain of Os04g41560.4

SEQ ID NO: 273 - protein, 38 aa, Oryza sativa; identical to SEQ ID NO: 261
  conserved domain of Os04g41560.4

SEQ ID NO: 274 - protein, 38 aa, Glycine max
  conserved domain of Glyma11g13570
CDVCEKAPATVICCADEAALCAKCDVEVHAANKLASKH

SEQ ID NO: 275 - protein, 38 aa, Glycine max
  conserved domain of Glyma11g13570.1
CDICQDKPAFIFCVEDRALFCKDCDEPIHLASSLSANH

SEQ ID NO: 276 - protein, 38 aa, Glycine max; identical to SEQ ID NO: 274
  conserved domain of Glyma12g05570.1

SEQ ID NO: 277 - protein, 38 aa, Glycine max; identical to SEQ ID NO: 275
  conserved domain of Glyma12g05570.1

SEQ ID NO: 278 - protein, 38 aa, Glycine max
  conserved domain of Glyma13g41980.1
CDVCERAPATVICCADEAALCAKCDVEVHAANKLASKH

SEQ ID NO: 279 - protein, 38 aa, Glycine max
  conserved domain of Glyma13g41980.1
CDICQDKPAFIFCVEDRALFCQDCDEPIHSAGSLSANH

SEQ ID NO: 280 - protein, 34 aa, Glycine max
  conserved domain of Glyma13g41980.2
QDKPAFIFCVEDRALFCQDCDEPIHSAGSLSANH

SEQ ID NO: 281 - protein, 33 aa, Glycine max
  conserved domain of Glyma13g41980.2
DKPAFIFCVEDRALFCQDCDEPIHSAGSLSANH

SEQ ID NO: 282 - protein, 34 aa, Glycine max; identical to SEQ ID NO: 280
  conserved domain of Glyma13g41980.3

SEQ ID NO: 283 - protein, 33 aa, Glycine max; identical to SEQ ID NO: 281
  conserved domain of Glyma13g41980.3

SEQ ID NO: 284 - protein, 38 aa, Glycine max; identical to SEQ ID NO: 278
  conserved domain of Glyma15g03400.1

SEQ ID NO: 285 - protein, 38 aa, Glycine max; identical to SEQ ID NO: 279
  conserved domain of Glyma15g03400.1

SEQ ID NO: 286 - protein, 38 aa, Solanum lycopersicum
  conserved domain of AAS67368
CDVCEKAQATVICCADEAALCAKCDIEVHAANKLASKH

SEQ ID NO: 287 - protein, 38 aa, Solanum lycopersicum
  conserved domain of AAS67368
CDICQDKAAFIFCVEDRALFCKDCDEAIHSASSLAKNH

SEQ ID NO: 288 - protein, 38 aa, Arabidopsis thaliana
  conserved domain of AtBBX20 (G1888)
CAVCDKEEASVFCCADEAALCNGCDRHVHFANKLAGKH

SEQ ID NO: 289 - protein, 38 aa, Arabidopsis thaliana
  conserved domain of AtBBX20 (G1888)
CDICGERRALLFCQEDRAILCRECDIPIHQANEHTKKH

SEQ ID NO: 290 - protein, 38 aa, Arabidopsis thaliana
  conserved domain of AtBBX21 (G1482)
CDVCDKEEASVFCTADEASLCGGCDHQVHHANKLASKH

SEQ ID NO: 291 - protein, 38 aa, Arabidopsis thaliana
  conserved domain of AtBBX21 (G1482)
CDICQDKKALLFCQQDRAILCKDCDSSIHAANEHTKKH

SEQ ID NO: 292 - protein, 38 aa, Zea mays
  conserved domain of ACG44133.1
CDVCAAEAASVFCCADEAALCDACDDRVHRANKLAGKH

SEQ ID NO: 293 - protein, 38 aa, Zea mays
  conserved domain of ACG44133.1
CDICQERRGFLFCKEDRAILCRECDAPVHSANDMTRRH

SEQ ID NO: 294 - protein, 38 aa, Zea mays; identical to SEQ ID NO: 292
  conserved domain of CAW36814.1

SEQ ID NO: 295 - protein, 38 aa, Zea mays; identical to SEQ ID NO: 293
  conserved domain of CAW36814.1

SEQ ID NO: 296 - protein, 38 aa, Populus trichocarpa
  conserved domain of Pt_195637
CDVCDNVEATVFCCADEAALCDGCDHRVHHANKLASKH

SEQ ID NO: 297 - protein, 38 aa, Populus trichocarpa
  conserved domain of Pt_195637
CDICQERRALLFCQEDRAILCRECDLPIHKANEHTQKH

SEQ ID NO: 298 - protein, 38 aa, Populus trichocarpa
  conserved domain of Pt_550941
CDVCNKEEASVFCTADEAALCDTCDHRVHHANKLASKH

SEQ ID NO: 299 - protein, 38 aa, Populus trichocarpa
  conserved domain of Pt_550941
CDICQEKRAFLFCQQDRAILCRECDGPIHTANEHTQKH

SEQ ID NO: 300 - protein, 38 aa, Populus trichocarpa
  conserved domain of Pt_801530
CDVCSKEEASVFCTADEAALCDTCDHRVHHANKLASKH

SEQ ID NO: 301 - protein, 38 aa, Populus trichocarpa
  conserved domain of Pt_801530
CDICQDKRAFLFCQQDRAILCRDCDGPIHTANEHTQKH

SEQ ID NO: 302 - protein, 38 aa, Populus trichocarpa
  conserved domain of Pt_804174
CDVCDKVEATVFCCADEAALCDGCDHRVHHANTLASKH

SEQ ID NO: 303 - protein, 38 aa, Populus trichocarpa
  conserved domain of Pt_804174
CDICQERRAVLFCQEDRAILCRECDLPIHKVNEHTQKH

SEQ ID NO: 304 - protein, 38 aa, Oryza sativa
  conserved domain of Os02g43170.1
CDVCAAEAASVFCCADEAALCDACDHRVHRANKLAGKH

SEQ ID NO: 305 - protein, 38 aa, Oryza sativa
  conserved domain of Os02g43170.1
CDICQEKRGFLFCKEDRAILCRECDVPVHTASELTMRH

SEQ ID NO: 306 - protein, 38 aa, Oryza sativa; identical to SEQ ID NO: 304
  conserved domain of Os02g43170.2

SEQ ID NO: 307 - protein, 38 aa, Oryza sativa; identical to SEQ ID NO: 305
  conserved domain of Os02g43170.2

SEQ ID NO: 308 - protein, 38 aa, Oryza sativa
  conserved domain of Os04g45690.1
CDVCAAEAASVFCCADEAALCDACDRRVHSANKLAGKH

SEQ ID NO: 309 - protein, 38 aa, Oryza sativa
  conserved domain of Os04g45690.1
CDICQEKRGFLFCKEDRAILCRECDVTVHTTSELTRRH

SEQ ID NO: 310 - protein, 38 aa, Oryza sativa; identical to SEQ ID NO: 308
  conserved domain of G5159

SEQ ID NO: 311 - protein, 38 aa, Oryza sativa; identical to SEQ ID NO: 309
  conserved domain of G5159

SEQ ID NO: 312 - protein, 38 aa, Oryza sativa
  conserved domain of Os06g49880.1
CDVCAAEPAAVLCCADEAALCSACDRRVHRANRLASKH

SEQ ID NO: 313 - protein, 38 aa, Oryza sativa
  conserved domain of Os06g49880.1
CDVCREKRGLVFCVEDRAILCADCDEPIHSANDLTAKH

SEQ ID NO: 314 - protein, 38 aa, Oryza sativa; identical to SEQ ID NO: 312
  conserved domain of Os06g49880.2

SEQ ID NO: 315 - protein, 38 aa, Oryza sativa; identical to SEQ ID NO: 313
  conserved domain of Os06g49880.2

SEQ ID NO: 316 - protein, 38 aa, Glycine max
  conserved domain of Glyma04g01120.1
CAVCDKVEASVFCSADEAALCHSCDRTIHHANKLATKH

SEQ ID NO: 317 - protein, 38 aa, Glycine max
  conserved domain of Glyma04g01120.1
CDICQERRAYLFCQEDRALLCRECDVPIHRANEHTQKH

SEQ ID NO: 318 - protein, 38 aa, Glycine max
  conserved domain of G5365
CDVCNKHQASFFCTADEAALCDGCDHRVHHANKLASKH

SEQ ID NO: 319 - protein, 38 aa, Glycine max
  conserved domain of G5365
CDVCQERRAFVFCQQDRAILCKECDVPIHSANDLTKNH

SEQ ID NO: 320 - protein, 38 aa, Glycine max; identical to SEQ ID NO: 318
  conserved domain of Glyma04g02960.2

SEQ ID NO: 321 - protein, 38 aa, Glycine max; identical to SEQ ID NO: 319
  conserved domain of Glyma04g02960.2

SEQ ID NO: 322 - protein, 38 aa, Glycine max
  conserved domain of Glyma06g01140.1
CDVCDKVEASVFCPADEAALCHSCDRTIHRANKLATKH

SEQ ID NO: 323 - protein, 38 aa, Glycine max; identical to SEQ ID NO: 317
  conserved domain of Glyma06g01140.1

SEQ ID NO: 324 - protein, 38 aa, Glycine max
  conserved domain of G5367
CDVCNKQQASLFCTADEAALCDGCDHRVHHANKLASKH

SEQ ID NO: 325 - protein, 38 aa, Glycine max
  conserved domain of G5367
CDVCQERRAFVFCQQDRAILCKECDVPVHSANDLTKNH

SEQ ID NO: 326 - protein, 38 aa, Glycine max
  conserved domain of Glyma11g12060.1
CDVCHNEVASFFCPSDEASLCHACDRTIHHANKLADKH

SEQ ID NO: 327 - protein, 38 aa, Glycine max
  conserved domain of Glyma11g12060.1
CDICHERRAYLFCKEDRAILCRECDLSIHGVNEHTKKH

SEQ ID NO: 328 - protein, 38 aa, Glycine max
  conserved domain of G5396
CDVCNKHEASVFCTADEAALCDGCDHRVHHANKLASKH

SEQ ID NO: 329 - protein, 38 aa, Glycine max
  conserved domain of G5396
CDICQERRAFTFCQQDRAILCKECDVSIHSANEHTLKH

SEQ ID NO: 330 - protein, 38 aa, Glycine max; identical to SEQ ID NO: 328
  conserved domain of G5400

SEQ ID NO: 331 - protein, 38 aa, Glycine max; identical to SEQ ID NO: 329
  conserved domain of G5400

SEQ ID NO: 332 - protein, 37 aa, Arabidopsis thaliana
  conserved domain of AtBBX26 (G1486)
CHTCRHVTAVIHCVTEALNFCLTCDNLRHHNNIHAEH

SEQ ID NO: 333 - protein, 37 aa, Arabidopsis thaliana
  conserved domain of AtBBX30 (G1478)
CELCGENATVYCEADAAFLCRKCDRWVHSANFLARRH

SEQ ID NO: 334 - protein, 37 aa, Arabidopsis thaliana
  conserved domain of AtBBX31 (G1929)
CELCDGDASVFCEADSAFLCRKCDRWVHGANFLAWRH

SEQ ID NO: 335 - protein, 37 aa, Populus trichocarpa
  conserved domain of Pt_562313
CELCGSRASLYCQADDAFLCQKCDKWVHGANFLAQRH

SEQ ID NO: 336 - protein, 37 aa, Populus trichocarpa
  conserved domain of Pt_594447
CELCGSRATLYCQADHAFLCQKCDGWVHGANFLALRH

SEQ ID NO: 337 - protein, 37 aa, Glycine max
  conserved domain of Glyma12g32230.1
CELCGLQASLYCQADDAYLCKKCDKRVHEANFLALRH

SEQ ID NO: 338 - protein, 37 aa, Glycine max
  conserved domain of G4019
CELCGLQASLYCQADDAYLCRKCDKRVHEANFLALRH

SEQ ID NO: 339 - protein, 38 aa, Arabidopsis thaliana
  conserved domain of AtBBX7 (G2440)
CDFCGEQRSMVYCRSDAACLCLSCDRSVHSANALSKRH

SEQ ID NO: 340 - protein, 47 aa, Arabidopsis thaliana
  conserved domain of AtBBX7 (G2440)
CERCNAQPATVRCVEERVSLCQNCDWSGHNNSNNNNSSSSSTSPQQH

SEQ ID NO: 341 - protein, 42 aa, Arabidopsis thaliana
  conserved domain of AtBBX7 (G2440)
RNNAVMRYKEKKKARKFDKRVRYASRKARADVRRRVKGRFVK

SEQ ID NO: 342 - protein, 38 aa, Arabidopsis thaliana
  conserved domain of AtBBX8 (G1479)
CDFCGEQRSMVYCRSDAACLCLSCDRNVHSANALSKRH

SEQ ID NO: 343 - protein, 40 aa, Arabidopsis thaliana
  conserved domain of AtBBX8 (G1479)
CERCNAQPASVRCSDERVSLCQNCDWSGHDGKNSTTTSHH

SEQ ID NO: 344 - protein, 42 aa, Arabidopsis thaliana
  conserved domain of AtBBX8 (G1479)
RNNAVMRYKEKKKARKFDKRVRYVSRKERADVRRRVKGRFVK

SEQ ID NO: 345 - protein, 38 aa, Zea mays
  conserved domain of ACF80403.1
CGFCGKQRSMIYCRSDAASLCLSCDRSVHSANALSRRH

SEQ ID NO: 346 - protein, 38 aa, Zea mays
  conserved domain of ACF80403.1
CDRCGLQPASVRCLEDNTSLCQNCDWNGHDAASGASGH

SEQ ID NO: 347 - protein, 42 aa, Zea mays
  conserved domain of ACF80403.1
RDSALTRYKEKKKKRMFDKKIRYASRKARADVRKRVKGRFIK

SEQ ID NO: 348 - protein, 38 aa, Zea mays
  conserved domain of ACG34885.1
CDFCGEQRSMVYCRSDAASLCLSCDRNVHSANALSRRH

SEQ ID NO: 349 - protein, 38 aa, Zea mays
  conserved domain of ACG34885.1
CDRCASQPAMVRCLAENASLCQNCDWNGHIAGSSSAGH

SEQ ID NO: 350 - protein, 42 aa, Zea mays
  conserved domain of ACG34885.1
RDSALTRYKEKKMRRKFDKKIRYASRKARADVRKRVKGRFVK

SEQ ID NO: 351 - protein, 38 aa, Zea mays
  conserved domain of ACN25813.1
CDFCGKQRSMIYCRSDAASLCLSCDRNVHSANALSRRH

SEQ ID NO: 352 - protein, 38 aa, Zea mays
  conserved domain of ACN25813.1
CDRCGSQPASVRCLEDNASLCQNCDWNGHDAESGASGH

SEQ ID NO: 353 - protein, 20 aa, Zea mays
  conserved domain of ACN25813.1
YASRKARADVRKRVKGRFIK

SEQ ID NO: 354 - protein, 38 aa, Populus trichocarpa
  conserved domain of Pt_247140
CDFCGEQRSMVYCRSDAASLCLSCDRNVHSANALSKRH

SEQ ID NO: 355 - protein, 38 aa, Populus trichocarpa
  conserved domain of Pt_247140
CERCNSQPALVRCAEERISLCQNCDWIGHGTSTSASTH

SEQ ID NO: 356 - protein, 42 aa, Populus trichocarpa
  conserved domain of Pt_247140
RSDAVMRYKEKKKTRMFEKKVRYASRKARADVRRRVKGRFVK

SEQ ID NO: 357 - protein, 38 aa, Populus trichocarpa
  conserved domain of Pt_409151
CDFCGEQRSMVYCRSDAACLCLSCDQIVHSANALSKRH

SEQ ID NO: 358 - protein, 38 aa, Populus trichocarpa
  conserved domain of Pt_409151
CERCNSQPALVRRVEERISLCQNCDWMGYGSSTSASTH

SEQ ID NO: 359 - protein, 42 aa, Populus trichocarpa
  conserved domain of Pt_409151
RSDAVKRYMEKKKTRKFEKKVRYASRKARADVRRRVKGRFVK

SEQ ID NO: 360 - protein, 38 aa, Oryza sativa
  conserved domain of Os02g49230.1
CDFCREQRSMVYCRSDAASLCLSCDRNVHSANALSRRH

SEQ ID NO: 361 - protein, 38 aa, Oryza sativa
  conserved domain of Os02g49230.1
CDRCVGQPAAVRCLEENTSLCQNCDWNGHGAASSAAGH

SEQ ID NO: 362 - protein, 42 aa, Oryza sativa
  conserved domain of Os02g49230.1
RDNALTRYKEKKKRRKFDKKIRYASRKARADVRKRVKGRFVK

SEQ ID NO: 363 - protein, 38 aa, Oryza sativa; identical to SEQ ID NO: 360
  conserved domain of Os02g49230.2

SEQ ID NO: 364 - protein, 38 aa, Oryza sativa; identical to SEQ ID NO: 361
  conserved domain of Os02g49230.2

SEQ ID NO: 365 - protein, 42 aa, Oryza sativa; identical to SEQ ID NO: 362
  conserved domain of Os02g49230.2

SEQ ID NO: 366 - protein, 38 aa, Oryza sativa; identical to SEQ ID NO: 360
  conserved domain of Os02g49230.3

SEQ ID NO: 367 - protein, 38 aa, Oryza sativa; identical to SEQ ID NO: 361
  conserved domain of Os02g49230.3

SEQ ID NO: 368 - protein, 42 aa, Oryza sativa; identical to SEQ ID NO: 362
  conserved domain of Os02g49230.3

SEQ ID NO: 369 - protein, 38 aa, Oryza sativa; identical to SEQ ID NO: 360
  conserved domain of Os02g49230.4

SEQ ID NO: 370 - protein, 38 aa, Oryza sativa; identical to SEQ ID NO: 361
  conserved domain of Os02g49230.4

SEQ ID NO: 371 - protein, 42 aa, Oryza sativa; identical to SEQ ID NO: 362
  conserved domain of Os02g49230.4

SEQ ID NO: 372 - protein, 38 aa, Oryza sativa; identical to SEQ ID NO: 360
  conserved domain of Os02g49230.5

SEQ ID NO: 373 - protein, 38 aa, Oryza sativa; identical to SEQ ID NO: 361
  conserved domain of Os02g49230.5

SEQ ID NO: 374 - protein, 42 aa, Oryza sativa; identical to SEQ ID NO: 362
  conserved domain of Os02g49230.5

SEQ ID NO: 375 - protein, 38 aa, Oryza sativa; identical to SEQ ID NO: 360
  conserved domain of Os02g49230.6

SEQ ID NO: 376 - protein, 38 aa, Oryza sativa; identical to SEQ ID NO: 361
  conserved domain of Os02g49230.6

SEQ ID NO: 377 - protein, 42 aa, Oryza sativa; identical to SEQ ID NO: 362
  conserved domain of Os02g49230.6

SEQ ID NO: 378 - protein, 38 aa, Oryza sativa; identical to SEQ ID NO: 348
  conserved domain of Os06g19444.1

SEQ ID NO: 379 - protein, 38 aa, Oryza sativa
  conserved domain of Os06g19444.1
CDRCASQPAMVRCLVENASLCQNCDWNGHSAGSSAAGH

SEQ ID NO: 380 - protein, 20 aa, Oryza sativa
  conserved domain of Os06g19444.1
YASRKARADVRKRVKGRFVK

SEQ ID NO: 381 - protein, 38 aa, Oryza sativa; identical to SEQ ID NO: 348
  conserved domain of Os06g19444.2

SEQ ID NO: 382 - protein, 38 aa, Oryza sativa; identical to SEQ ID NO: 379
  conserved domain of Os06g19444.2

SEQ ID NO: 383 - protein, 20 aa, Oryza sativa
  conserved domain of Os06g19444.2
YASRKARADVRKRVKGRFVK

SEQ ID NO: 384 - protein, 38 aa, Glycine max
  conserved domain of Glyma02g38870.1
CDFCGDQRSLVYCRSDSACLCLSCDRNVHSANALSRRH

SEQ ID NO: 385 - protein, 38 aa, Glycine max
  conserved domain of Glyma02g38870.1
CERCNSQPAFVRSVEEKISLCQNCDWLGHGTSPSSSMH

SEQ ID NO: 386 - protein, 42 aa, Glycine max
  conserved domain of Glyma02g38870.1
RSNAVMRYKEKKKTRKFEKKVRYASRKARADVRKRVKGRFVK

SEQ ID NO: 387 - protein, 42 aa, Glycine max
  conserved domain of Glyma13g11590.1
RSNAVMRYKEKKKTRMFDKKVRYASRKARADVRRRVKGRFVK

SEQ ID NO: 388 - protein, 38 aa, Glycine max
  conserved domain of Glyma14g36930.1
CDFCGDQRSLVYCRSDAACLCLSCDRNVHSANALSRRH

SEQ ID NO: 389 - protein, 38 aa, Glycine max
  conserved domain of Glyma14g36930.1
CERCNSQPAFVRCVDEKISLCQNCDWLGHGTSPSSSTH

SEQ ID NO: 390 - protein, 42 aa, Glycine max; identical to SEQ ID NO: 386
  conserved domain of Glyma14g36930.1

SEQ ID NO: 391 - protein, 38 aa, Glycine max; identical to SEQ ID NO: 388
  conserved domain of Glyma14g36930.2

SEQ ID NO: 392 - protein, 38 aa, Glycine max; identical to SEQ ID NO: 389
  conserved domain of Glyma14g36930.2

SEQ ID NO: 393 - protein, 42 aa, Glycine max; identical to SEQ ID NO: 386
  conserved domain of Glyma14g36930.2

SEQ ID NO: 394 - protein, 42 aa, Glycine max; identical to SEQ ID NO: 387
  conserved domain of Glyma20g07050.1

SEQ ID NO: 395 - protein, 42 aa, Glycine max; identical to SEQ ID NO: 387
  conserved domain of Glyma20g07050.2

SEQ ID NO: 396 - protein, 38 aa, Arabidopsis thaliana
  conserved domain of AtBBX19 (G902)
CDACENAAAIIFCAADEAALCRPCDEKVHMCNKLASRH

SEQ ID NO: 397 - protein, 36 aa, Arabidopsis thaliana
  conserved domain of AtBBX19 (G902)
CDICENAPAFFYCEIDGSSLCLQCDMVVHVGGKRTH

SEQ ID NO: 398 - protein, 38 aa, Arabidopsis thaliana
  conserved domain of AtBBX18 (G1881)
CDACESAAAIVFCAADEAALCCSCDEKVHKCNKLASRH

SEQ ID NO: 399 - protein, 36 aa, Arabidopsis thaliana; identical to SEQ ID NO: 397
  conserved domain of AtBBX18 (G1881)

SEQ ID NO: 400 - protein, 38 aa, Zea mays
  conserved domain of ACF85933.1
CDVCESAPAVLFCAADEAALCRPCDEKVHMCNKLASRH

SEQ ID NO: 401 - protein, 36 aa, Zea mays
  conserved domain of ACF85933.1
CDICENSPAFFYCEIDGTSLCLSCDMTVHVGGKRTH

SEQ ID NO: 402 - protein, 38 aa, Zea mays; identical to SEQ ID NO: 400
  conserved domain of ACL52378.1

SEQ ID NO: 403 - protein, 36 aa, Zea mays; identical to SEQ ID NO: 401
  conserved domain of ACL52378.1

SEQ ID NO: 404 - protein, 38 aa, Populus trichocarpa
  conserved domain of Pt_648693
CDVCESAAAILFCAADEAALCRSCDEKVHMCNKLASRH

SEQ ID NO: 405 - protein, 36 aa, Populus trichocarpa
  conserved domain of Pt_648693
CDICEKAPAFFYCEIDGSSLCLQCDMIVHVGGKRTH

SEQ ID NO: 406 - protein, 38 aa, Populus trichocarpa
  conserved domain of Pt_721866
CDVCESAAAILFCAADEAALCRSCDEKVHLCNKLASRH

SEQ ID NO: 407 - protein, 36 aa, Populus trichocarpa
  conserved domain of Pt_721866
CDICENAPAFFYCEIDGSSLCLQCDMIVHVGGKRTH

SEQ ID NO: 408 - protein, 38 aa, Populus trichocarpa
  conserved domain of Pt_741179
CDACESAFAIVFCAADEAALCLACDKKVHMCNKLASRH

SEQ ID NO: 409 - protein, 36 aa, Populus trichocarpa
  conserved domain of Pt_741179
CDICENAPAFFYCETDGSSLCLQCDMTVHVGGKRTH

SEQ ID NO: 410 - protein, 38 aa, Populus trichocarpa
  conserved domain of Pt_820080
CDACESAAAIVFCAADEAALCLACDEKVHMCNKLASRH

SEQ ID NO: 411 - protein, 36 aa, Populus trichocarpa; identical to SEQ ID NO: 409
  conserved domain of Pt_820080

SEQ ID NO: 412 - protein, 38 aa, Oryza sativa
  conserved domain of Os09g35880.1
CDVCESAPAVLFCVADEAALCRSCDEKVHMCNKLARRH

SEQ ID NO: 413 - protein, 36 aa, Oryza sativa
  conserved domain of Os09g35880.1
CDICENAPAFFYCEIDGTSLCLSCDMTVHVGGKRTH

SEQ ID NO: 414 - protein, 38 aa, Glycine max
  conserved domain of Glyma01g37370.1
CDACESAAAIVFCAADEAALCRACDEKVHMCNKLASRH

SEQ ID NO: 415 - protein, 36 aa, Glycine max
  conserved domain of Glyma01g37370.1
CDICENAPAFFYCETDGSSLCLQCDMIVHVGGKRTH

SEQ ID NO: 416 - protein, 38 aa, Glycine max; identical to SEQ ID NO: 414
  conserved domain of Glyma11g07930.1

SEQ ID NO: 417 - protein, 36 aa, Glycine max; identical to SEQ ID NO: 415
  conserved domain of Glyma11g07930.1

SEQ ID NO: 418 - protein, 38 aa, Glycine max; identical to SEQ ID NO: 414
  conserved domain of Glyma11g07930.2

SEQ ID NO: 419 - protein, 36 aa, Glycine max; identical to SEQ ID NO: 415
  conserved domain of Glyma11g07930.2

SEQ ID NO: 420 - protein, 38 aa, Glycine max; identical to SEQ ID NO: 414
  conserved domain of Glyma11g07930.3

SEQ ID NO: 421 - protein, 36 aa, Glycine max; identical to SEQ ID NO: 415
  conserved domain of Glyma11g07930.3

SEQ ID NO: 422 - protein, 38 aa, Glycine max; identical to SEQ ID NO: 414
  conserved domain of Glyma11g07930.4

SEQ ID NO: 423 - protein, 36 aa, Glycine max; identical to SEQ ID NO: 415
  conserved domain of Glyma11g07930.4

SEQ ID NO: 424 - protein, 38 aa, Glycine max
  conserved domain of Glyma11g11850.1
CDVCESAAAILFCAADEAALCSACDHKIHMCNKLASRH

SEQ ID NO: 425 - protein, 36 aa, Glycine max; identical to SEQ ID NO: 407
  conserved domain of Glyma11g11850.1

SEQ ID NO: 426 - protein, 38 aa, Glycine max
  conserved domain of Glyma12g04130.1
CDVCESAAAIVFCAADEAALCSACDHKIHMCNKLASRH

SEQ ID NO: 427 - protein, 36 aa, Glycine max; identical to SEQ ID NO: 407
  conserved domain of Glyma12g04130.1

SEQ ID NO: 428 - DNA, 3157 bp, artificial sequence
  pMEN65 vector (35S::MCS::E9)
  misc_feature (7)..(10): n is a, c, g, or t
  misc_feature (17)..(52): n is a, c, g, or t
aagcttnnnnctgcagnnnnnnnnnnnnnnnnnnnnnnnnnnnnnnnnnnnntcggattccattgcccagctatctgtcactttattgtgaagatagtgaaaaagaaggtggctcctacaaatgccatcattgcgataaaggaaaggccatcgttgaagatgcctctgccgacagtggtcccaaagatggacccccacccacgaggagcatcgtggaaaaagaagacgttccaaccacgtcttcaaagcaagtggattgatgtgatggtccgattgagacttttcaacaaagggtaatatccggaaacctcctcggattccattgcccagctatctgtcactttattgtgaagatagtggaaaaggaaggtggctcctacaaatgccatcattgcgataaaggaaaggccatcgttgaagatgcctctgccgacagtggtcccaaagatggacccccacccacgaggagcatcgtggaaaaagaagacgttccaaccacgtcttcaaagcaagtggattgatgtgatatctccactgacgtaagggatgacgcacaatcccactatccttcgcaagacccttcctctatataaggaagttcatttcatttggagaggacacgctgacaagctgactctagcagatctggtaccgtcgacggtgagctccgcggccgctctagacaggcctcgtaccggatcctctagctagagctttcgttcgtatcatcggtttcgacaacgttcgtcaagttcaatgcatcagtttcattgcgcacacaccagaatcctactgagtttgagtattatggcattgggaaaactgtttttcttgtaccatttgttgtgcttgtaatttactgtgttttttattcggttttcgctatcgaactgtgaaatggaaatggatggagaagagttaatgaatgatatggtccttttgttcattctcaaattaatattatttgttttttctcttatttgttgtgtgttgaatttgaaattataagagatatgcaaacattttgttttgagtaaaaatgtgtcaaatcgtggcctctaatgaccgaagttaatatgaggagtaaaacacttgtagttgtaccattatgcttattcactaggcaacaaatatattttcagacctagaaaagctgcaaatgttactgaatacaagtatgtcctcttgtgttttagacatttatgaactttcctttatgtaattttccagaatccttgtcagattctaatcattgctttataattatagttatactcatggatttgtagttgagtatgaaaatattttttaatgcattttatgacttgccaattgattgacaacatgcatcaatcgacctgcagccactcgaagcggccggccgccactcgagatcatgagcggagaattaagggagtcacgttatgacccccgccgatgacgcgggacaagccgttttacgtttggaactgacagaaccgcaacgttgaaggagccactcagccgcgggtttctggagtttaatgagctaagcacatacgtcagaaaccattattgcgcgttcaaaagtcgcctaaggtcactatcagctagcaaatatttcttgtcaaaaatgctccactgacgttccataaattcccctcggtatccaattagagtctcatattcactctcaatccaaataatctgcaccggatctggatcgtttcgcatgattgaacaagatggattgcacgcaggttctccggccgcttgggtggagaggctattcggctatgactgggcacaacagacaatcggctgctctgatgccgccgtgttccggctgtcagcgcaggggcgcccggttctttttgtcaagaccgacctgtccggtgccctgaatgaactgcaggacgaggcagcgcggctatcgtggctggccacgacgggcgttccttgcgcagctgtgctcgacgttgtcactgaagcgggaagggactggctgctattgggcgaagtgccggggcaggatctcctgtcatctcaccttgctcctgccgagaaagtatccatcatggctgatgcaatgcggcggctgcatacgcttgatccggctacctgcccattcgaccaccaagcgaaacatcgcatcgagcgagcacgtactcggatggaagccggtcttgtcgatcaggatgatctggacgaagagcatcaggggctcgcgccagccgaactgttcgccaggctcaaggcgcgcatgcccgacggcgaggatctcgtcgtgacccatggcgatgcctgcttgccgaatatcatggtggaaaatggccgcttttctggattcatcgactgtggccggctgggtgtggcggaccgctatcaggacatagcgttggctacccgtgatattgctgaagagcttggcggcgaatgggctgaccgcttcctcgtgctttacggtatcgccgctcccgattcgcagcgcatcgccttctatcgccttcttgacgagttcttctgagcgggactctggggttcgaaatgaccgaccaagcgacgcccaacctgccatcacgagatttcgattccaccgccgccttctatgaaaggttgggcttcggaatcgttttccgggacgccggctggatgatcctccagcgcggggatctcatgctggagttcttcgcccacgggatctctgcggaacaggcggtcgaaggtgccgatatcattacgacagcaacggccgacaagcacaacgccacgatcctgagcgacaatatgatcgggcccggcgtccacatcaacggcgtcggcggcgactgcccaggcaagaccgagatgcaccgcgatatcttgctgcgttcggatattttcgtggagttcccgccacagacccggatgatccccgatcgttcaaacatttggcaataaagtttcttaagattgaatcctgttgccggtcttgcgatgattatcatataatttctgttgaattacgttaagcatgtaataattaacatgtaatgcatgacgttatttatgagatgggtttttatgattagagtcccgcaattatacatttaatacgcgatagaaaacaaaatatagcgcgcaaactaggataaattatcgcgcgcggtgtcatctatgttactagatcgggctcgag

SEQ ID NO: 429 - DNA, 906 bp, Arabidopsis thaliana
  BBX32 (G1988)
tgctactctcatcaaccatgaaccataaaaactccaccgctctttctctccctcaatcatttacatctcttccttaaatctctcttcccaccatcatcattccaaaccaattctctctcacttctttctggtgatcagagagatcgactcaatggtgagcttttgcgagctttgtggtgccgaagctgatctccattgtgccgcggactctgccttcctctgccgttcttgtgacgctaagttccatgcctcaaattttctcttcgctcgtcatttccggcgtgtcatctgcccaaattgcaaatctcttactcaaaatttcgtttctggtcctcttcttccttggcctccacgaacaacatgttgttcagaatcgtcgtcttcttcttgctgctcgtctcttgactgtgtctcaagctccgagctatcgtcaacgacgcgtgacgtaaacagagcgcgagggagggaaaacagagtgaatgccaaggccgttgcggttacggtggcggatggcatttttgtaaattggtgtggtaagttaggactaaacagggatttaacaaacgctgtcgtttcatatgcgtctttggctttggctgtggagacgaggccaagagcgacgaagagagtgttcttagcggcggcgttttggttcggcgttaagaacacgacgacgtggcagaatttaaagaaagtagaagatgtgactggagtttcagctgggatgattcgagcggttgaaagcaaattggcgcgtgcaatgacgcagcagcttagacggtggcgcgtggattcggaggaaggatgggctgaaaacgacaacgtttgagaaatattattgacatgggtcccgcattatgcaaattaggacatttagtgtttagtgcattaattatagtttgtgtc

SEQ ID NO: 430 - protein, 225 aa, Arabidopsis thaliana
  G1988 polypeptide (BBX32, domain in aa coordinates: 5-50)
MVSFCELCGAEADLHCAADSAFLCRSCDAKFHASNFLFARHFRRVICPNCKSLTQNFVSGPLLPWPPRTTCCSESSSSSCCSSLDCVSSSELSSTTRDVNRARGRENRVNAKAVAVTVADGIFVNWCGKLGLNRDLTNAVVSYASLALAVETRPRATKRVFLAAAFWFGVKNTTTWQNLKKVEDVTGVSAGMIRAVESKLARAMTQQLRRWRVDSEEGWAENDNV

SEQ ID NO: 431 - DNA, 732 bp, Glycine max
  G4004
atgaagcccaagacttgcgagctttgtcatcaactagcttctctctattgtccctccgattccgcatttctctgcttccactgcgacgccgccgtccacgccgccaacttcctcgtagctcgccacctccgccgcctcctctgctccaaatgcaaccgtttcgccgcaattcacatctccggtgctatatcccgccacctctcctccacctgcacctcttgctccctggagattccttccgccgactccgattctctcccttcctcttctacctgcgtctccagttccgagtcttgctctacgaatcagattaaggcggagaagaagaggaggaggaggaggaggagtttctcgagttcctccgtgaccgacgacgcatctccggcggcgaagaagcggcggagaaatggcggatcggtggcggaggtgtttgagaaatggagcagagagatagggttagggttaggggtgaacggaaatcgcgtggcgtcgaacgctctgagtgtgtgcctcggaaagtggaggtcgcttccgttcagggtggctgctgcgacgtcgttttggttggggctgagattttgtggggacagaggcctcgccacgtgtcagaatctggcgaggttggaggcaatatctggagtgccagcaaagctgattctgggcgcacatgccaacctcgcacgtgtcttcacgcaccgccgcgaattgcaggaaggatggggcgagtcctag

SEQ ID NO: 432 - protein, 243 aa, Glycine max
  G4004 polypeptide
MKPKTCELCHQLASLYCPSDSAFLCFHCDAAVHAANFLVARHLRRLLCSKCNRFAAIHISGAISRHLSSTCTSCSLEIPSADSDSLPSSSTCVSSSESCSTNQIKAEKKRRRRRRSFSSSSVTDDASPAAKKRRRNGGSVAEVFEKWSREIGLGLGVNGNRVASNALSVCLGKWRSLPFRVAAATSFWLGLRFCGDRGLATCQNLARLEAISGVPAKLILGAHANLARVFTHRRELQEGWGES

SEQ ID NO: 433 - DNA, 726 bp, Glycine max
  G4005
atgaagggtaagacttgcgagctttgtgatcaacaagcttctctctattgtccctccgattccgcatttctctgctccgactgcgacgccgccgtgcacgccgccaactttctcgtagctcgtcacctccgtcgcctcctctgctccaaatgcaaccgtttcgccggatttcacatctcctccggcgctatatcccgccacctctcgtccacctgcagctcttgctccccggagaatccttccgctgactactccgattctctcccttcctcttctacctgcgtctccagttccgagtcttgctccacgaagcagattaaggcggagaagaagaggagttggtcgggttcctccgtgaccgacgacgcatctccggcggcgaagaagcggcagaggagtggaggatcggaggaggtgtttgagaaatggagcagagagatagggttagggttagggttaggggtaaacggaaatcgcgtggcgtcgaacgctctgagtgtgtgcctgggaaagtggaggtggcttccgttcagggtggctgctgcgacgtcgttttggttggggctgagattttgtggggacagagggctggcctcgtgtcagaatctggcgaggttggaggcaatatccggagtgccagttaagctgattctggccgcacatggcgacctggcacgtgtcttcacgcaccgccgcgaattgcaggaaggatggggcgagtcctag

SEQ ID NO: 434 - protein, 241 aa, Glycine max
  G4005 polypeptide
MKGKTCELCDQQASLYCPSDSAFLCSDCDAAVHAANFLVARHLRRLLCSKCNRFAGFHISSGAISRHLSSTCSSCSPENPSADYSDSLPSSSTCVSSSESCSTKQIKAEKKRSWSGSSVTDDASPAAKKRQRSGGSEEVFEKWSREIGLGLGLGVNGNRVASNALSVCLGKWRWLPFRVAAATSFWLGLRFCGDRGLASCQNLARLEAISGVPVKLILAAHGDLARVFTHRRELQEGWGES

SEQ ID NO: 435 - DNA, 1047 bp, Glycine max
  GmBBX1
atgttggatggagaagcaacaatgggcacgtgggctcgcatgtgcgacacgtgccgttcggccccctcctccgtgttctgccgcgcccacaccgccttcctctgcgccacgtgcgacgcgcgcctccacgcctcgctgacgtggcacgagcgcgtgtgggtgtgcgaggcctgcgagcgcgcccctgcggccttcctctgcaaggctgacgccgcctccctctgcgcctcctgcgacgccgacatccacgccgccaaccccctcgccagccgccaccaccgtgtccccatcctccccatcgccgccgcccccggcaacaacgacaacgacaacgtcgacgatgctgacttggacgacgatgacgaaaccgcttcatggctcttgctcaaccctgtcaaaagcgctagtgtccctaacaacaataacactaataatgggttctcgtataatggtgaggttgatgagtatttggaccttgttgatgactgcgacaaccaccactttgcttctgttgctactactacggaccattactctcatcagcaccaacatttcggtgttgtttctcacaagagttatgctggggacagtgttgttccggttcagcaccaccagcattttcagcttggcttggagtttgacaactccaaagctgccttcagttacaatgcttctgttaatcaaagtgtttcagtttcatcaatggatattggtgttgtacctgaatcaccgatgagggatgtctcaattggccatacaagaacccccaaagggacaattgacctattttctggacctcccattcaggtgccttcccatttttctccaatggacagggaggccagagtcctaaggtacagggagaaaaagaagacaagaaaatttgagaagacaatcaggtatgcctcaaggaaggcctatgcagagactagaccccgtataaaaggtcgatttgccaagagaacagatgtagaagctgaagtggatcagatgttctccacaacactaattacagaagttggatatggcattgttccctctttctga

SEQ ID NO: 436 - protein, 348 aa, Glycine max
  GmBBX1 soybean B-box polypeptide
MLDGEATMGTWARMCDTCRSAPSSVFCRAHTAFLCATCDARLHASLTWHERVWVCEACERAPAAFLCKADAASLCASCDADIHAANPLASRHHRVPILPIAAAPGNNDNDNVDDADLDDDDETASWLLLNPVKSASVPNNNNTNNGFSYNGEVDEYLDLVDDCDNHHFASVATTTDHYSHQHQHFGVVSHKSYAGDSVVPVQHHQHFQLGLEFDNSKAAFSYNASVNQSVSVSSMDIGVVPESPMRDVSIGHTRTPKGTIDLFSGPPIQVPSHFSPMDREARVLRYREKKKTRKFEKTIRYASRKAYAETRPRIKGRFAKRTDVEAEVDQMFSTTLITEVGYGIVPSF

SEQ ID NO: 437 - DNA, 1059 bp, Glycine max
  GmBBX2
atgttggagggccaagcaacaacgcccacgtggccgcgcatgtgcgacacgtgccgctccgtcccctccaccgtcttctgccgctcccacaccgcctttctctgcgccacgtgcgacactcgcctccacgtctctctcacgtggcacgagcgcgtgtgggtgtgcgaggcgtgcgagcgcgccccggcggcgttcctctgcaaggccgacgccgcctccctctgcgcctcctgcgacgccgacatccacgccgccaaccccctcgccagccgccaccaccgcgtccccatcctccccatcgccgccgccaacaacaacaacaacgacgacgacgacgttgctgacgttgacgacgaagacgaaaccgcttcatggctcttgctcaaccctatcaagagtgctactgtccctaacaccaataacaataacaataataacgggttcttgtataacggtgaggttgatgagtatttggaccttgttgataattgtaactcttgtggtgataataatcacttcgcttcagctgctgctactactgatcattacgctcagcaccaacatttcgctggtgtttctcagaagagttatgctggggacagtgttgttccggttcagcaacaccagcattttcagcttgggttggagtttgacaactccaaacctgccttcagttacaatggttctgttagtcaaagtgtttcagtttcatcaatggatattggtgttgtacctgaatcaccaatgagggatgtctcaattgcccatacaagaccccccaaagggacaattgacctattttctggacctccaattcaggtgccttcccatttttctccaatggacagggaggccagagtcctaaggtacagggagaaaaagaagatgagaaaatttgagaagacaatcaggtatgcctcaaggaaggcctatgcagagactagacctcgtataaaaggtcgatttgccaagagaacagatgtagaagctgaagtggatcagatgttctcgacaacactaattacagaagttggatatggaattgttccctctttctga

SEQ ID NO: 438 - protein, 352 aa, Glycine max
  GmBBX2 soybean B-box polypeptide
MLEGQATTPTWPRMCDTCRSVPSTVFCRSHTAFLCATCDTRLHVSLTWHERVWVCEACERAPAAFLCKADAASLCASCDADIHAANPLASRHHRVPILPIAAANNNNNDDDDVADVDDEDETASWLLLNPIKSATVPNTNNNNNNNGFLYNGEVDEYLDLVDNCNSCGDNNHFASAAATTDHYAQHQHFAGVSQKSYAGDSVVPVQQHQHFQLGLEFDNSKPAFSYNGSVSQSVSVSSMDIGVVPESPMRDVSIAHTRPPKGTIDLFSGPPIQVPSHFSPMDREARVLRYREKKKMRKFEKTIRYASRKAYAETRPRIKGRFAKRTDVEAEVDQMFSTTLITEVGYGIVPSF

SEQ ID NO: 439 - DNA, 1086 bp, Glycine max
  GmBBX3
atgttgaaggaaggcaccaacaacgttggtggcagcaccggcacctggtcacatgtctgcgacacgtgccggtcagcgccatgcgtactgtactgccatgcagactcagcatacctttgctcatcctgcgatgctcgtgtccatgcggctaaccgtgtggcctcaagacacgagcgtgtgtgggtgtgcgaagcgtgtgaacgtgctcccgcagcgtttctatgcaaagccgacgcagcttctctttgttcttcctgtgatgctgacattcactcagcaaaccctctcgctagccgccaccaccgcgtgcccattctcccgatctctggttccctcttcggggaaccagagcatgaacgcgtgtacgcgttcgtgaatgaagtggaagcggaggaggaagaggaagaggtttttgatgagtatgatgaggttgaagcagcttcgtggttgttgccacatcctatgaaaaatgataaaattgacgagaatggtggtgataagggttttttgtttggtgatgagtatttcgacaaccttgttgattgtaactcatgtggtcacaataacaaccagtttagcaacgtttatgatcagcaccagcagaattacagcaacactgtccctcagaactatgcagtggttccagttcaggtgccgcagcattttcaaccgggtttggactttgactcatcaaaagctgggttcagttacgatggttctcttagtcaaagtgtttcggtttcatcgatggatgttggtgttgtactcgaatcaacaataagtgacatctcaatgtcccactcaaagtcgccaatagggacaactgacctatttcctccccttcccatgccttcacatctcacaccaatggacagagaggcaagagtcctaagatacagggagaaaaagaagacaagaaaatttgagaagaaaataaggtatgcctcaaggaaggcctatgcagagactagaccccgcataaagggtcgttttgcaaagagaaccgatgtagaagctgaagtggaccagatgttctccacaacactattcactgaagttggaggtagcatttttcccactttctag

SEQ ID NO: 440 - protein, 361 aa, Glycine max
  GmBBX3 soybean B-box polypeptide
MLKEGTNNVGGSTGTWSHVCDTCRSAPCVLYCHADSAYLCSSCDARVHAANRVASRHERVWVCEACERAPAAFLCKADAASLCSSCDADIHSANPLASRHHRVPILPISGSLFGEPEHERVYAFVNEVEAEEEEEEVFDEYDEVEAASWLLPHPMKNDKIDENGGDKGFLFGDEYFDNLVDCNSCGHNNNQFSNVYDQHQQNYSNTVPQNYAVVPVQVPQHFQPGLDFDSSKAGFSYDGSLSQSVSVSSMDVGVVLESTISDISMSHSKSPIGTTDLFPPLPMPSHLTPMDREARVLRYREKKKTRKFEKKIRYASRKAYAETRPRIKGRFAKRTDVEAEVDQMFSTTLFTEVGGSIFPTF

SEQ ID NO: 441 - DNA, 1101 bp, Glycine max
  GmBBX4
atgttgaaggaaggcaccaacaacgttggtggcagcaacactggcaccacctggtcacgtgtctgtgacacgtgcctgtctgcgccatgcgtgctgtactgccatgcagactcagcatatctttgctcttcctgtgatgctcgtgtgcatgcagctaaccgtgtggcctcgagacacaagcgtgtgtgggtgtgcgaagcgtgtgagcgtgctccggcggcgtttctatgcaaagctgacgcagcttctctttgttcttcctgtgatgctgacattcactcagcaaaccctctcgctagccgccacaaccgtgttcccattctcccgatctcaggttccctcttcagggaaccagagcacaatcacaaacgcgtggaacacgcgttcgtgaatgaggttgaggaggaagaggaaggggtttttgatgagtatgaagacgaggttgaagctgcttcgtggttgttgccacatcctatgaaaaataatgatgaaattgaggagaatgattgtggtgacgagggttttttgtttgttgatgagtatttggacaatcttgttgattgttgtaactcatgtggtcacaatgacaaccagtttagcaacgtttatcagcaccagcagaattacaacactgtccctcagaactatgtagtggttccagttcaggtgccgcagcattttcaacccggtttggactttgactcatcaaaagctgggttcagttacgatggttctcttagtcaaagtgtttcggtttcatcaatggatgttggagttgtacccgaatcaacagtaagtggcatctcaatgtcccactcaaagtcaccaatagggacaaatgacctatttcctccccttctcatgccttcacatctcacaccaatggacagagaggcaagagtcctaagatatagggagaaaaagaagacaagaaagttcgagaagaaaataagatatgcctcaaggaaggcctatgcagagactagaccccgcataaagggtcgttttgcaaagagaactgatgtagaagctgaagtggatcagatgttctccacaaaactattcaatgaagttggaggtagcatttttcccactttctag

SEQ ID NO: 442 - protein, 366 aa, Glycine max
  GmBBX4 soybean B-box polypeptide
MLKEGTNNVGGSNTGTTWSRVCDTCLSAPCVLYCHADSAYLCSSCDARVHAANRVASRHKRVWVCEACERAPAAFLCKADAASLCSSCDADIHSANPLASRHNRVPILPISGSLFREPEHNHKRVEHAFVNEVEEEEEGVFDEYEDEVEAASWLLPHPMKNNDEIEENDCGDEGFLFVDEYLDNLVDCCNSCGHNDNQFSNVYQHQQNYNTVPQNYVVVPVQVPQHFQPGLDFDSSKAGFSYDGSLSQSVSVSSMDVGVVPESTVSGISMSHSKSPIGTNDLFPPLLMPSHLTPMDREARVLRYREKKKTRKFEKKIRYASRKAYAETRPRIKGRFAKRTDVEAEVDQMFSTKLFNEVGGSIFPTF

SEQ ID NO: 443 - DNA, 1098 bp, Glycine max
  GmBBX5
atgggaattgaaagaggaggcttgaagggattcaggagcggctggagtgtgccgccgaagaagccatgcgactcctgtaagctggcttcggcggcgcttttctgccacctcgattccgcgtttctctgcatcgcgtgcgattccaagattcactgcgcgaataaactcgcgtcgcgccacgagcgcgtgtggatgtgtgaggtgtgcgagcaggcacccgcttctgtcacgtgcaaggctgacgcggccgccctttgcgtcacgtgcgactccgacatccactccgccaacccactcgcgcaacgccacgagcgcgttcccgtggagcccttcttcgattccgcggaatccatcgtcaaagcctccgccaccgcctctttcgggttcgtcgtcccctccgacgatggcgctgcctccgacgtcttcgcccccgacgactccgactccgccgcctggctcatcccgaaccccaatttcgggtccaaactcatggacgcccccgaaatcaagtccaaggagatattcttctctgaaatggaccccttcctcgattttgattactcaaactccttccaaaaccacaacagcgccgtaaacgacagtgtcgttccagttcaaaccaaaccctctctcgcccctccccccatcaacaatcaccagcaccaccaccaatctgagacttgcttcgacatcgatttttgccgctcgaagctctcctcctttaactacccatcccagtctcttagccaaagcgtttcttcgtcgtcgcttgatgtcggagtggtgccggacgggaacacagtgtcggacatgtcgtattcgagtgggattgtggtgtcgggtggacaaggcgcgacgcagttgtgtgggatggatcgggaagcgagggtgctgcgatacagagagaaaaggaagaaccgaaaatttgagaagacgattcgatacgcatcgcgaaaggcttatgcggaaacccggcccaggataaaaggccggttcgcgaaacgaaccgaaattgactcggatgtggagcgtctctatagccctggcgctgcggcgctcatgctggacactccatacggtgtcgtaccaacgttttag

SEQ ID NO: 444 - protein, 365 aa, Glycine max
  GmBBX5 soybean B-box polypeptide
MGIERGGLKGFRSGWSVPPKKPCDSCKLASAALFCHLDSAFLCIACDSKIHCANKLASRHERVWMCEVCEQAPASVTCKADAAALCVTCDSDIHSANPLAQRHERVPVEPFFDSAESIVKASATASFGFVVPSDDGAASDVFAPDDSDSAAWLIPNPNFGSKLMDAPEIKSKEIFFSEMDPFLDFDYSNSFQNHNSAVNDSVVPVQTKPSLAPPPINNHQHHHQSETCFDIDFCRSKLSSFNYPSQSLSQSVSSSSLDVGVVPDGNTVSDMSYSSGIVVSGGQGATQLCGMDREARVLRYREKRKNRKFEKTIRYASRKAYAETRPRIKGRFAKRTEIDSDVERLYSPGAAALMLDTPYGVVPTF

SEQ ID NO: 445 - DNA, 1125 bp, Glycine max
  GmBBX6
atgggaattgaaagaggaggcttcaagggattcaggagcgcctggagcgtgccgcccaagccgtgcgattcctgcaagctggcctcggcggcgcttttctgccgccccgattccgcgtttctctgcatcgcctgcgattccaacattcactgctcgaacaaactcgcgtcgcgccacgagcgcgtgtggatgtgtgaggtgtgcgagcaggcacccgctgctgtcacgtgcaaggccgacgccgccgccctctgcgtcacgtgtgactccgacatccactccgcgaaccccctcgcgcaacgccacgagcgcgtccccgtggaacctttctttgactccgctgagtccatagtgaaagcctctgctgccgccaccttcgggttcattgtcccatccgacgacggcggcgcctccgacgctttcgcccccgatgactccgacgccgccgcgtggctcatcccgaaccctaatttcgggtccaagctcatggacgcccccgaaatcaagtccaaggagatattcttctctgaaatggaccccttcctcgattttgattactcaaactccttccaaaacaacaacagcgccggaaacgacagcgtcgttccagttcaaaaaccctctctcgcccctcccctaatcaataatcaccaccaccaccaatcagaaacttgcttcgacgtcgatttttgtcgctcgaagctctcctcctttaactacccttccaattctcttagccaaagcgtttcgtcgtcgtcgcttgatgttggagtggtgccggacgggaacacggtgtcagacatgtcgtattcttttggtcggaacagttcggattcgagtgggattgttgttgtgtcaggaaatagtgtggggcaaggtgcgacgcagttgtgtggaatggatcgggaagcgagggtactgcgatacagagagaaaaggaagaaccgaaaattcgagaagacaattcgatacgcatcgcgaaaagcatatgcggaaacccggcccaggataaaaggccgcttcgccaaacgaacagaaattgactcggatgtggagcgtctctatagccctggccctgcggtgctcatgctggacactccatacggcgtcgtaccatcgttttag

SEQ ID NO: 446 - protein, 89 aa, Glycine max
  GmBBX6 soybean B-box polypeptide
MGIERGGFKGFRSAWSVPPKPCDSCKLASAALFCRPDSAFLCIACDSNIHCSNKLASRHERVWMCEVCEQAPAAVTCKADAAALCVTCD

SEQ ID NO: 447 - DNA, 684 bp, Glycine max
  GmBBX7
atggtcaatcaactcttcgactcatgcaaatcagccactgctaccttgtactgccgcatcgacacgacgttcctctgcggcacctgtgactctaaggttcatgccgccaacaagctcgtgtcgcgccacccgcgcgttgcactctgcgaggtgtgcaagcaggcgtcaacgcatgtgacctgcaaggccggcgctgccgctctctgcctcacctgtgactctgagatccactccaccaaccccctcgccagccgccacgagcgcatccccatcacgctgttcttcgagtacgtacactcagtcaaggcctcttcatcgatcaacttccaccactgcttcttctccgacaccgacgctgatgtcagcaccaaggaggccgaggtcgcgtcctggctactaaataatctgaagacatatctaaattcgtctcagtacttgttctcagaaaagttccgccatcgccgatggcgtcattccagtgtagagcaacttcaagccgttcacctacgagcaccaaacatctttcttcacagctacttctctcgatctagaaccttcggagtaattaattattacatactaactggagttagatccaacataaatgacttctctctcaacttacaaaatcaagttaaaaatattattaagtctaaaattgctctcaataattttttccaataa

SEQ ID NO: 448 - protein, 227 aa, Glycine max
  GmBBX7 soybean B-box polypeptide
MVNQLFDSCKSATATLYCRIDTTFLCGTCDSKVHAANKLVSRHPRVALCEVCKQASTHVTCKAGAAALCLTCDSEIHSTNPLASRHERIPITLFFEYVHSVKASSSINFHHCFFSDTDADVSTKEAEVASWLLNNLKTYLNSSQYLFSEKFRHRRWRHSSVEQLQAVHLRAPNIFLHSYFSRSRTFGVINYYILTGVRSNINDFSLNLQNQVKNIIKSKIALNNFFQ

SEQ ID NO: 449 - DNA, 930 bp, Glycine max
  GmBBX11
atggcttccaagctctgcgactcatgcaaatccgccactgctaccttgtactgccgccctgacgccgcgttcctctgcggcgcctgcgattctaaggtccacgccgccaacaagctcgcgtcgcgccacccgcgcgtggcgctctgcgaggtgtgcgagcaggccccggcgcacgtaacctgcaaggctgatgccgccgcgctctgccttgcctgcgaccgcgacatccactccgccaaccccctcgccagccgccacgagcgcatccccgtctcaccgttcttcgagtccgtacactccgtcaaggcctcctcgccgatcaacttcctagatgaccaccgcttcttctccgacgccgatgctgacgtcagcaccgaggaggccgaggccgcctcctggctgcttcctaatccgaagacagatctaaattcctctcagtacttgttctccgaaaccgagccggttccttacatagatctggattatgctgccgtggatcctaaggcggagcagaaaagctccgccaccgccgacggcgtcgttcccgtgcagagcaacttcgagccattcgcctacggttacaagtacaataccactctctcacagtctcagatgagccagagtgtatcgtcgtcgtcgatggaggttggagtcgtgccggacgggaacacaatgtcggagacatcgaactgcagctacagcaaggtgcctccggtgacggtgacggtgacggcgcagttctcggcggcggatagggaggcgagagtgttgaggtacagggagaagaggaagaaccgtaagttcgagaagacgattcgttacgcatcgagaaaagcatatgcggaggcgaggccaaggatcaaagggaggtttgcgaaacgcactgacccggaccctctggctggatacggcgtcgttccgtcgtgttga

SEQ ID NO: 450 - protein, 174 aa, Glycine max
  GmBBX11 soybean B-box polypeptide
MASKLCDSCKSATATLYCRPDAAFLCGACDSKVHAANKLASRHPRVALCEVCEQAPAHVTCKADAAALCLACDRDIHSANPLASRHERIPVSPFFESVHSVKASSPINFLDDHRFFSDADADVSTEEAEAASWLLPNPKTDLNSSQYLFSETEPVPYIDLDYAAVDPKAEQKSS

SEQ ID NO: 451 - DNA, 933 bp, Glycine max
  GmBBX12
atggcttccaagctctgcgactcatgcaaatcagccactgctaccttgtactgccgccccgacgcggccttcctctgcggcgcctgtgactctaaggttcatgccgccaacaagctcgcatcgcgccacccgcgcgtcgtgctctgcgaggtgtgcgagcaggcgcccgcgcatgtgacctgtaaagccgacgccgccgcgctctgccttgcctgcgatcgcgatatccactccgccaaccccctcgccagccgccacgagcgcatccccgtcacgccgttcttcgagtccgtacattcagtcaaggcctcctcgccgatcaacttccaccaccgcttcttctccgacgccgacgctgatgctgacgtcagcaccgaggaggccgaggccgcgtcatggctgctacctaatccaaagacagatctaaattcgtctcagtacttgttctccgaaaccgaaccggttccttacatagatctggattacgcggccatggatccgaagacggagcagaaaagttccgccaccgccgacggcgtcgttccggtgcagagcaacttcgagccgttcacctacggttacaagtacaacactactctctcacagtcacagtctcatatgagccagagtgtatcttctccgtcgtcgatggaagttggagttgtgccggacgggaacacgatgtcggagatatcgaactgcagctacagcaaagtggcaccggtgacggtgacggcgcagttctcggcggcggatagggaggctagagtgttgaggtacagggagaagaggaagaaccgaaagttcgagaagaccattcgttacgcatcgagaaaagcgtatgccgaaacgaggccaagaatcaaaggaaggttcgcgaaacgcactgatgcggaccctctggctggatacggcgtcgttccgtcgtgttga

SEQ ID NO: 452 - protein, 310 aa, Glycine max
  GmBBX12 soybean B-box polypeptide
MASKLCDSCKSATATLYCRPDAAFLCGACDSKVHAANKLASRHPRVVLCEVCEQAPAHVTCKADAAALCLACDRDIHSANPLASRHERIPVTPFFESVHSVKASSPINFHHRFFSDADADADVSTEEAEAASWLLPNPKTDLNSSQYLFSETEPVPYIDLDYAAMDPKTEQKSSATADGVVPVQSNFEPFTYGYKYNTTLSQSQSHMSQSVSSPSSMEVGVVPDGNTMSEISNCSYSKVAPVTVTAQFSAADREARVLRYREKRKNRKFEKTIRYASRKAYAETRPRIKGRFAKRTDADPLAGYGVVPSC

SEQ ID NO: 453 - DNA, 1260 bp, Glycine max
  GmBBX13
atgagttcggctactaagaacgcggcaaacgcggttggggccaaaacggcaagagcatgtgacagctgcataaccaaacgtgcacgttggtactgtgctgccgatgatgcttttctctgccaggcctgcgactcttctgttcactcggcgaatcctttggctcgaagacacgaacgagtccgcttgaaaacggcgtcctacaagtccactgatgaacaacaacaacaacaacaacaacaacctcccacgtggcacactaagaaacctcgaacgccgaggcacgggaaacattctcgtaacaacaaccctttccatttggtccctgaagagggttcggaggaggcgaattcccatgatgagaacgaggagcagcttctttatagggtccccatattcgacccttttgttgctgagctatgtgggactaatagttctccttctcctgttacttcaactgatcaaggagtagttgctgctgctgaggttgaatacaaagggtttcaaagcaatggtttttgtagcaatagcagtgagatggaaaacttgcatgggatgcttccttctgatgcagaacttgctgagttcgctgctgatgtggagagcttgttgggtagggggcttgaaaacgagtgcgtggggatggaagaattgggactggttgatgcgaaagaggaggagtgttcggtaggtagtgggaaggtgaagatggaagatcaggaagagagccctctggtggagatggagatggatatggtcgtgggcagagatgatcaatcgtttgagttgagctttgattatgaaacgtgtgaagaggtgaaggtttgtgatttgggattggggaatgaattaggagcgaagaaagagaatgatgatgaggtgaaaaagaacaagatttcgttgcagctagactatgaggcggtaatcatcgcctgggctagccaaaaatctccgtggaccaccgctgacaaaccaaacttggaccctgatgagtgctggaaacaatgcatgggaagttgcgaaacggcatatcatcatccttgcggtgaaatgggtggatttgggattcatccagtgataatagacgggggcagagaggcgagggtgtcaagatacagagagaagcgccgaacgaggttgttctcgaagaaaataaggtacgaagttaggaaattgaatgctgagaagagacccagaatgaaggggaggtttgtcaagagggcttcctttgcaccaccaacatttcctttgctaaataaataa

SEQ ID NO: 454 - protein, 419 aa, Glycine max
  GmBBX13 soybean B-box polypeptide
MSSATKNAANAVGAKTARACDSCITKRARWYCAADDAFLCQACDSSVHSANPLARRHERVRLKTASYKSTDEQQQQQQQQPPTWHTKKPRTPRHGKHSRNNNPFHLVPEEGSEEANSHDENEEQLLYRVPIFDPFVAELCGTNSSPSPVTSTDQGVVAAAEVEYKGFQSNGFCSNSSEMENLHGMLPSDAELAEFAADVESLLGRGLENECVGMEELGLVDAKEEECSVGSGKVKMEDQEESPLVEMEMDMVVGRDDQSFELSFDYETCEEVKVCDLGLGNELGAKKENDDEVKKNKISLQLDYEAVIIAWASQKSPWTTADKPNLDPDECWKQCMGSCETAYHHPCGEMGGFGIHPVIIDGGREARVSRYREKRRTRLFSKKIRYEVRKLNAEKRPRMKGRFVKRASFAPPTFPLLNK

SEQ ID NO: 455 - DNA, 1257 bp, Glycine max
  GmBBX14
atgagttcggctactaagaacgcagcaaacgcggttgggggaaaaactgcaagagcatgtgacggctgcataacgaaacgtgcacgttggtactgtgctgccgatgatgcttttctctgccaggcttgtgactcttcggttcacttggcgaatcctttggctcgaagacacgaacgagtccgcttgaaaaccgcgtcgtacaagtccaccgatgaacgacgacaacctcccacgtggcacaccaagaaacctcgaacgcccagacatgggaaacattctcgtaacaacaaccctttccacttggtccctgaagagggttccgaagaggcgaattcccatgatgagaatgaggagcagctcgtttatagggtccccatagtcgacccttttgttgctgagctatgtgggactaatagttctccttcttctgttacttcaactgatcaaggggtagtagctgctgctgctgctgcttctgctgaggttgaatacaaagggattcaaagcaatgatttttgtagcaatagcaatgagatcgaaaacttgcatgggatgcttccttcggatgcagaacttgctgagtttgctgctgatgttgagagctttttgggtagggggcttgaaaacaagtgcgtggggatggaagaattgggactcgttgataccaaagaagaggagtgttcggtgggtagtgggaaggtgaaggtggaagaggaagagagccctctgatggagatggatatgggaagagatgatcaatcatttgagttgagctttgattatgagacgtgtgaagaggtaaaggagatgaaggttagtgatttggaattggggaatgagttaggagagatgaaagagaatgatgatgatgaggtgaaaaggaagaaggtatcgttgcagcttgattatgaggcgataatcatcgcctgggctagccaaaagtctccgtggaccactgctgacaaacaaaacttggaccctgatgagtgctggcaccaatgcatgggaagttgcggaacggcatttcatcacccttacggtgaactgggtggatttgggattcattcagtgatagtagacgggggcagagaggcaagggtgtcaagatacagagagaagcgccgaactaggttgttctcgaagaaaataaggtacgaggttaggaaattgaatgcagagaagagacccagaatgaaggggaggtttgttaagagggcttcctttgcaccaccaacatttcctttgctaaataaataa

SEQ ID NO: 456 - protein, 88 aa, Glycine max
  GmBBX14 soybean B-box polypeptide
MSSATKNAANAVGGKTARACDGCITKRARWYCAADDAFLCQACDSSVHLANPLARRHERVRLKTASYKSTDERRQPPTWHTKKPRTPR

SEQ ID NO: 457 - DNA, 1098 bp, Glycine max
  GmBBX15
atgagagacatgaaagacgcaggtgccttgggaggcaagacagcaagagcctgcgacagctgcgtaagcagaagagcaaggtggttctgtgcagctgatgatgctttcctctgccatggctgcgacactttggttcattccgcgaaccagttagcaagcaggcacgaaagggttcggcttcaaactgcttcctcaaaagtaaccaccacgcacgcatggcacagtggattcacacgcaaggcaagaaccccgcgtcacaacagcaagcactttgcgctgcaacagcgtctcaaagacgaagttctcttcaacaacaccagtgttcttcccctcgtgccggagctcggaggggaagaacaagaaccggtggttgtggataacgatgagacggaggagcagatgctgtgtcgggtgcccgtgttcgacccttttgatgtgagaaccgatgacttggatagtttttctgacatggatttcgctgagtttgctgctgatgttgaaagcctacttgataaagaagacgatgaaataagtgcgtgtgtgggagggggagagggagttcaaggtgcaatggtgaaggttaaggatgaagaagaaattgatggtgatgtagcgtgttatctggaatcggtttttgatgatgcctttcattggaataacattgagtctgtgctgtcagatgcacgggaagagaaggagggtgtggtggcgtgtgatggaggtgtcggtgatgaagaaggaggaacaaagagagacatatttttgagactaaactatgatgaggttattactgcttggtctagccaaggttcttctccatggacaacttcaaacccacctaagttcaactctgattatgacttctccttgggtttgagtggtgtaggtggggaagtaagaagcttaagggggcacctagatggtggaagagaagcaagagtgtcaaggtatagagagaagagaaggactcgtttgtttgcaaagaagataagatatgaagtaaggaagttgaacgcagagaaaaggcctagaatgaaaggtcgttttgtgaagaggacatgctttgttggagccaatgcttttcctgcttaccactga

SEQ ID NO: 458 - protein, 365 aa, Glycine max
  GmBBX15 soybean B-box polypeptide
MRDMKDAGALGGKTARACDSCVSRRARWFCAADDAFLCHGCDTLVHSANQLASRHERVRLQTASSKVTTTHAWHSGFTRKARTPRHNSKHFALQQRLKDEVLFNNTSVLPLVPELGGEEQEPVVVDNDETEEQMLCRVPVFDPFDVRTDDLDSFSDMDFAEFAADVESLLDKEDDEISACVGGGEGVQGAMVKVKDEEEIDGDVACYLESVFDDAFHWNNIESVLSDAREEKEGVVACDGGVGDEEGGTKRDIFLRLNYDEVITAWSSQGSSPWTTSNPPKFNSDYDFSLGLSGVGGEVRSLRGHLDGGREARVSRYREKRRTRLFAKKIRYEVRKLNAEKRPRMKGRFVKRTCFVGANAFPAYH

SEQ ID NO: 459 - DNA, 1116 bp, Glycine max
  GmBBX16
atgagagacatgaaagacgcaggtgccctgggaggcaagacagcacgagcctgcgatagctgcgtaagcagaagggcaaggtggttctgtgcagcagatgatgctttcctctgccatgcttgcgacactttggttcattccgcgaaccagttagcaagcagacacgaaagggttcggcttcaaactgcatcctctaaggcaaccacaaccactacgcacgcatggcacagtggattcacacgcaaggcaagaaccccgcgtcacaacaacagcaagcactttgcgctgcaacagcgtctcaaacacgaagttctcttcaacaacaccagtgttcttcccctcgtgccggagctcggaggggaagaacaagaaccggtggttgtggacaacgatgaaacggaggaacagatgctgtgtcgcgtgcccgtgttcgacccttttgatgtgagaaccgatgacttggatagcttttctgacatggatttttctgaatttgctgctgatgttgaaggccggcttgacaaagaagacgatgaaataagtgcgtatgtgggaggaggagagggagttcaaggtgtattggccaaggttaagggcgaagaagaaattgatggtgatgtagcgtgttatctggagtcagtttttgacatgatcagtgatgatgcctttcattggaataatattgagtctgtggtgtcagatgcccgggaagagaaggggtgtgtggtgccatgtgatggtggggttagtgaacaaggaggaataaagagagacatatttttgagactaaactatgatgaggttattactgcttggtctagccaaggttcttccccatggacaacttcaaacccacctaagttcaactctgattatgacttctccttgggtttgagtggtgtagatggagaaggaagaagcttaaggggacacctagatggtggaagagaagcaagagtgtcgaggtatagagagaagagaaggactcgtttgtttgcaaagaagataagatatgaagtaaggaagttgaacgcagagaaaaggcctagaatgaaaggtcgttttgtgaagaggacatgctttgttggagccaatgcttttcctgcttaccactga

SEQ ID NO: 460 - protein, 309 aa, Glycine max
  GmBBX16 soybean B-box polypeptide
ASSKATTTTTHAWHSGFTRKARTPRHNNSKHFALQQRLKHEVLFNNTSVLPLVPELGGEEQEPVVVDNDETEEQMLCRVPVFDPFDVRTDDLDSFSDMDFSEFAADVEGRLDKEDDEISAYVGGGEGVQGVLAKVKGEEEIDGDVACYLESVFDMISDDAFHWNNIESVVSDAREEKGCVVPCDGGVSEQGGIKRDIFLRLNYDEVITAWSSQGSSPWTTSNPPKFNSDYDFSLGLSGVDGEGRSLRGHLDGGREARVSRYREKRRTRLFAKKIRYEVRKLNAEKRPRMKGRFVKRTCFVGANAFPAYH

SEQ ID NO: 461 - DNA, 1179 bp, Glycine max
  GmBBX17
atgaccaacgaaatgaaagaagcaagtgccttaggagctagaacagcacgagcatgcgagagctgcctaaaagtaagagcaaggtggtattgtgcagctgatgatgctttcctttgccatggctgtgacaacatggttcactcagcaaaccaattagcaagcagacacgaaagggtgaagcttcaaactgcatcctccaaggtcaactactcagtgacccctaaggtagcatggcacagtggattcacacgcaaggcaagaacccctcgcagcaacaacaagcactcatcgctgcaacaacaacaacaaaaaccattacatgaagaacaaggagaagaagaagaacttggaagtgaagagccattgcttaatgatgagaccgaggagcaactcctgtgtcgcgtgcccgtatttgatgctgagctttcctttgacttggaaaacttttcttctgagtttctaccaacagatatggatcttgctgagttttctgctgatgtggaaagcttacttggaaacggggttgatgaggattcacctgtgaagaaaggatcagaactagtgcttcttgattgcaaagaagaaggagatgatgaaatggatgcatgtgttaatggaattggagccaacaaagatgcaatggttaaggtcaaagatgaagaagaacttgatgctgatgatgacacagcttgccatttggattcgattcttgacatgaatagcgaggcctttaattggaatattgctgagtcagagtcacctgcacaggcacaagaagatgaaaagtcattactgcttgggcaagtcaaggttctccatggactacaggaaccccacctaaacttggtaacttctcttcaaccctctttgcttatgcagcagtatcttcttgaggaaggttgtgttgcgtcttcagtaaccgatgtaaaattcgtcgatatacctgaaatcattcgtagggcggagatgtgttatgccttcgatgggggaagagaagcaagagtgtcaaggtaccgagagaagagaagaacgcgtttatttgcaaagaagataaggtatgaagtgaggaagttaaacgcggagaaaagacctagaatgaaaggtcgatttgtgaagagtgttcctttgttggagccactgctttgccagcttaattatcaatcatcaccactgacatga

SEQ ID NO: 462 - protein, 392 aa, Glycine max
  GmBBX17 soybean B-box polypeptide
MTNEMKEASALGARTARACESCLKVRARWYCAADDAFLCHGCDNMVHSANQLASRHERVKLQTASSKVNYSVTPKVAWHSGFTRKARTPRSNNKHSSLQQQQQKPLHEEQGEEEELGSEEPLLNDETEEQLLCRVPVFDAELSFDLENFSSEFLPTDMDLAEFSADVESLLGNGVDEDSPVKKGSELVLLDCKEEGDDEMDACVNGIGANKDAMVKVKDEEELDADDDTACHLDSILDMNSEAFNWNIAESESPAQAQEDEKSLLLGQVKVLHGLQEPHLNLVTSLQPSLLMQQYLLEEGCVASSVTDVKFVDIPEIIRRAEMCYAFDGGREARVSRYREKRRTRLFAKKIRYEVRKLNAEKRPRMKGRFVKSVPLLEPLLCQLNYQSSPLT

SEQ ID NO: 463 - DNA, 1284 bp, Glycine max
  GmBBX18
atgaccaacgaaatgaaagaagcaagtgccttaggagctagaacagcacgagcatgcgagagctgcctaaaagtaagagcacggtggtattgtgcagctgatgatgcattcctttgccatggctgtgacaacatggttcactcagcaaaccaattagcaagtagacacgaaagggttaagcttcaaactgcatcctctaaggtcaactactcagtgacccctaaggtagcatggcacagtggattcacacgcaaggcaagaacgccacgccacaacaacaacagacactcatcattgaaacaacaacaacaaaaaaaaccattacatgaagaacgaggagaggaagaagtgtttttcaataacactattagtcttcttccccttgtgcctgagcttggaagtgaagagccattgcttaatgatgagactgaggagcaactactgtgtcgcgtgccggtgtttgatgctgagctgtgtagcatatacaatgaagtgaaggacgaggttgtagctgctggtgaagaagccttggacttggaaaacttttcttccgagtttcttccatcagatacggaccttgctgagtttactgctgatgtgaaaagctttcttggaaacggggctgatgaggattcacctgatgatgatgagcacgtgaaagaatcagaactactgattcttgattgcaaagaagaagaaggagatgaggaaatggatgaatgtattgatggagtactaattggagccaaagatgcaatggtgaaggtcaaagatgaagaagaacttgatgctgatgatgacacagcttgccatttggattcgattcttgatatgaacggcgaggcatttaattggaatattgttgaatcagaatcacctgcacaggcacaagaagatgaagtgagtaaagtgggaactaagaaggacatatttttgagattaaactatgaagaagtcattactgcttgggcaagtcaaggttctccatggactaatgggaccccacctaagttcttcaactctgatgattgctggctagacttcttgggttcgaatggtgggaatgttcaatgctgttatggggcagtgggaagcttaagggtgcatgcagatgggggaagggaagcaagagtgtcaaggtaccgagagaagagaagaacgcgtttatttgcaaagaagataaggtatgaagtgaggaagttgaacgcggagaaaagacctagaatgaaaggtcgatttgtgaagaggacaccctttgttggagccactgcgttgccagcttaa

SEQ ID NO: 464 - protein, 171 aa, Glycine max
  GmBBX18 soybean B-box polypeptide
MTNEMKEASALGARTARACESCLKVRARWYCAADDAFLCHGCDNMVHSANQLASRHERVKLQTASSKVNYSVTPKVAWHSGFTRKARTPRHNNNRHSSLKQQQQKKPLHEERGEEEVFFNNTISLLPLVPELGSEEPLLNDETEEQLLCRVPVFDAELCSIYNEVKDEVVA

SEQ ID NO: 465 - DNA, 1230 bp, Glycine max
  GmBBX19
atgggttatatatgtgatttttgtggagaccagagatccatggtgtactgccgctctgacgctgcatgcttatgtttgtcttgtgatcggaatgttcattctgctaatgccctttctaagcgtcattcacgcacccttttatgcgagagatgcaattcacaacctgcctttgtaaggtgtgttgaagagaagatttcactttgtcagaattgcgactggttgggtcatggcacctctacatcttcttcaacacataagagacaagcaatcaattgctactctggctgcccttcagcggcagaactgtcttcgatatggtcatttgtgttagaaatcgctgccataagtgagtctacatgtgagcaagaactaggcttaatgagtattaatgagaacaagtgtgttggtgttcctccggaagaccagaatgtgtctggttcagatgaagttaccgatctacctgctttgaacaagtctttggttggtgcatctttgatgcctgaatcaagctccgaaccttgtattctggaccagccagctggacctaccaatgaatgtctgccaaagttatactgtcctgctacaaaatgccctgccttatctgaagatgataatctgtatgatgatttcaacatggatgaagtggatctagatcttgagaactatgaagaactttttggtatggccctcagtcattctgaggagctttttgaaaatggtggaattgatagcttgtttgggacaaaaggcatgtctgctggagattccaattgtcaggaagctattgctgctgaggggtcgtcggttggacaggtcaatgcaatgcaaccagcttgcagcaatgcagcgtctgcagattccattttgagtactaaaactgaaccaattctttgttttactggaaggcaaactcaatcaaacctttctttttctggtgttactggagagagtagtgctggagactatcaagactgtggggcttcttcaatgcttctcatgggagaacctccttggtttgctccttgtccggagaattccctacaatccgccaaccgtagtaatgctgtcatgcggtacaaggaaaagaagaagacacggatgtttgacaaaaaagttaggtatgcctctcgcaaggcaagggctgatgtcagaaggcgtgtgaaagggcggtttgtcaaagccggtgacgtctatgattatgaccctttgagcacaaccagaagctgctga

SEQ ID NO: 466 - protein, 409 aa, Glycine max
  GmBBX19 soybean B-box polypeptide
MGYICDFCGDQRSMVYCRSDAACLCLSCDRNVHSANALSKRHSRTLLCERCNSQPAFVRCVEEKISLCQNCDWLGHGTSTSSSTHKRQAINCYSGCPSAAELSSIWSFVLEIAAISESTCEQELGLMSINENKCVGVPPEDQNVSGSDEVTDLPALNKSLVGASLMPESSSEPCILDQPAGPTNECLPKLYCPATKCPALSEDDNLYDDFNMDEVDLDLENYEELFGMALSHSEELFENGGIDSLFGTKGMSAGDSNCQEAIAAEGSSVGQVNAMQPACSNAASADSILSTKTEPILCFTGRQTQSNLSFSGVTGESSAGDYQDCGASSMLLMGEPPWFAPCPENSLQSANRSNAVMRYKEKKKTRMFDKKVRYASRKARADVRRRVKGRFVKAGDVYDYDPLSTTRSC

SEQ ID NO: 467 - DNA, 1224 bp, Glycine max
  GmBBX20
atgggctatatatgtgatttctgtggagaccagagatccatggtgtactgccgctctgatgctgcatgcttatgtttgtcttgtgatcggaatgttcattctgctaatgccctttctaagcgtcattcacgcacccttttatgtgagagatgcaattcacaacctgcctttgtaaggtgtgttgaagagaaaatttcactttgtcagaattgtgattggttgggtcatggcacctctacatcttcttcaacacacaagagacaggcaatcaattgctactctggctgcccttcagcggctgaactgtcttcaatatggtcatttgtgttagatatcgctgccataagtgaatctacatgtgagcaagaactaggcttaatgagtattaatgagaacaagagtgttggggttcctccagagggccagaatgtgtctggttcagatgaagttactgatcaacctgctttggacaagtctttggttggtacatcttcaatgcctgaatcaagctccaaacctcgtattctggaccagccagctagacctgccaatgaatgtctttcaaagttatactgtcctgctacaaaattccccgcattatgtgaaaatgataatctgtatgatgatttcaacatggatgaagtggatctaaatcttgagaactatgaagaactttttggtatggccctcagtcattctgaagagctatttgaaaatggtggaattgatagcttgtttgggacaaaagacatgtctgctggagatttcagttgtgaggatgctattgctgctgaggcatcacaaattccaactatgttggcacctcagcctcacaatgcagcatctgcagattccattttgagtactaaaactgaaccaattctttgttttacgggaaggcaagctcaatcaaacctttctttttctggcgttaccggagacagtagtgctggagactatcaagactgtggggcttcttcaatgcttctcatgggagaacctccttggtttgctccttgtcctgagaattccctacaatcagccaaccgtagtaatgctgtcatgcggtacaaggaaaagaagaagacacggatgtttgacaaaaaagtgaggtatgcctctcgcaaggcaagggctgatgtcagaaggcgcgtgaaaggccggtttgtcaaagctggtgacgtctacgattatgatcctttgagcacaaccagaagcttctga

SEQ ID NO: 468 - protein, 407 aa, Glycine max
  GmBBX20 soybean B-box polypeptide
MGYICDFCGDQRSMVYCRSDAACLCLSCDRNVHSANALSKRHSRTLLCERCNSQPAFVRCVEEKISLCQNCDWLGHGTSTSSSTHKRQAINCYSGCPSAAELSSIWSFVLDIAAISESTCEQELGLMSINENKSVGVPPEGQNVSGSDEVTDQPALDKSLVGTSSMPESSSKPRILDQPARPANECLSKLYCPATKFPALCENDNLYDDFNMDEVDLNLENYEELFGMALSHSEELFENGGIDSLFGTKDMSAGDFSCEDAIAAEASQIPTMLAPQPHNAASADSILSTKTEPILCFTGRQAQSNLSFSGVTGDSSAGDYQDCGASSMLLMGEPPWFAPCPENSLQSANRSNAVMRYKEKKKTRMFDKKVRYASRKARADVRRRVKGRFVKAGDVYDYDPLSTTRSF

SEQ ID NO: 469 - DNA, 1236 bp, Glycine max
  GmBBX21
atgggttacttatgtgatttttgtggagaccagaggtccctggtgtactgccgctctgatgctgcgtgcttatgtttgtcgtgtgatcgaaatgttcattctgctaatgccctttctaggcgtcattcgagaacccttgtatgcgagagatgcaattcgcaacctgcatttgtgaggtgtgttgatgagaagatttcactttgtcagaactgtgattggttgggtcatggtacctcaccatcttcttcgacacacaagaggcaatcaatcaattgctactctggctgcccttcagctgcagaattttcttcaatatggtcctttttcttagacatcccttctatgggtgaagcatgtgagcaggaactaggtttgatgagcattaatgagaacagcaataagaatgcttgggcttctccagaagggcagaatgtgtctggttcagctgaagtgactgatctacccagcaagggtaaatcttgggctggcacatcttcagtacctgagtcaagctcagaacctcgtattctagaccagccgcctggacctgccaatgaatgtatgcccaagttgtactgtcctgggaagaaagtttctggaatatatgaagatgatgatctatatgatgatttcatcatggatgaagtggatctacaacttgagaactacgaggaactttttgggatggctctcagtcactctgaagagctttttgaaaatggtggaattaatagcttatttgagacaaaggacatgtctgctagtgctggtgattcccattgtcagggtgctgttgctgctgagggatcgtctgctgagttggtcaatgctatccaaccagcatgcagcaatgcagcatctgcagactcaatgatgagtacaaaaactgaaccaattgtttgttttacggcaaggcaatctctatcaaacatttctttctctggtgttaccaaagatagtgttggtgactatcaagattgtggtgcttcttcaatgcttctcatgggagagcctccctggtgtcctccttgccctgagagttctctgcattctgctaaccgcagcaatgctgtcatgcgctataaggaaaagaagaagacccggaagttcgagaagaaagtaaggtatgcctctcgcaaggctagggctgatgtcagaaagcgtgtgaagggtcgatttgtcaaagccggtgatgtctatgactatgaccctttgaaccaaaccagaagctgctga

SEQ ID NO: 470 - protein, 411 aa, Glycine max; identical to SEQ ID NO: 144
  GmBBX21 soybean B-box polypeptide

SEQ ID NO: 471 - DNA, 1218 bp, Glycine max
  GmBBX22
atgggttacttatgtgatttttgtggagaccagaggtccttggtgtactgccgctctgattccgcgtgcttatgtttgtcatgcgatcgaaatgttcattctgccaatgcactttctaggcgtcattcgagaacccttgtatgcgagagatgcaattcacaacctgcatttgtgaggtctgttgaagagaaaatttcactttgtcagaactgtgattggttgggtcatggtacctcaccgtcttcttcgatgcacaagaggcaatcaatcaattgctactctggctgcccttcagcggcagaattttcttcaatatggtcctttttcttagacatcccttctttgggtgaagcatgtgagcaggaactaggtttgatgagcattaatgagaacattcctccagaagggcagaatgtgtctggttcaactgaagtgactgatctacccagcaagggtaaatcttgggctggcacaccttcaatacctgagtcaagctcagaacctcgtattctggaccagccgcctggacctgccaatgaatgtgtgcccaagttgtactgtcctgggaagaaagcttctggaatatgtgaagatgatgatctatatgatgatttcatcatggatgaagttgatctagaacttgagaactatgaggaactttttgggatggctctcagtcactctgaagagctttttgaaaatggtggaattaatagcttatttgaggcaaaggacatgtctgctagtgctggtgattcccattgtcagggtgctgttgctgctgagggatcgtctgctgggttggtcaatcctatccaaccagcatgcagcaatgcagcatctgcagattcagtgatgagtacaaaaactgaaccaattgtttgttttacggcaaggcaatctcaatcaaacatttccttttctggtgttaccaaagatagtgctggtgactatcaagactgtggtgcttcttcaatgcttctcatgggagaacctccctggtgtcctccttgccctgagagttctctgcattctgctaaccgaagcaatgctgtcatgcgctacaaggaaaaaaagaagacccggaagttcgagaagaaagtaagatatgcctctcgcaaggctagggctgatgtcagaaagcgtgtgaagggccgatttgtcaaagctggtgatgtctatgactatgaccctttgaaccaaaccagaagctactga

SEQ ID NO: 472 - protein, 405 aa, Glycine max; identical to SEQ ID NO: 140
  GmBBX22 soybean B-box polypeptide

SEQ ID NO: 473 - DNA, 1155 bp, Glycine max
  GmBBX23
atggatcctctatgtgagttttgtggggtggtgagagctgtggtttactgcaagtcagattctgctcgtctctgcttgcattgcgatggctgtgtacactctgcaaattctttgtctcgcaggcattcgcgttccctcctctgcgataagtgcaattcccagccggcaatgatccgctgcatggatcataagttgtcattgtgccaaggttgtgactggaatccaaatgactgttctgcattgggacataggcgtgttgcattgaattgttacactggttgtccctctttggctgagttttccaggatttggtcctttgtgtttgatgctaattcctcacttggtggttgggaatcggttggtactttgccaaaaagtgagagctgcactagccagtgtttggagcaaactgatcataacggtggttcctttggtttgtctcaaatcattccatcaaatccaaattacacgccgttctgcaaagacgaagcatttttctttcctcaagactcaaaccagccaaaggaatgtcctaatctaggaattcatgatgggagtgaactttgtgaaggtttcaatgttgataaccttcaattaaactttgaaagtgctgatgaaatatttggctgttcacaagatgccacaagataccaccttgaagatggaggaatggactgtttattgatggataaaaacatatcagtcacagaatctaattcacttattgagagtgccttggaggcatcatcatctatccaacaagattgtgtggcttttcaatcatccagggcgggtgggtcagctagtgtgatgcaggttatcaacagcaatacaaattctgcactaatgaatcctagctgcactagaaacatcagtctgggatttcctcagggtgttcattcaaagatgccacttcaatttcccaacattgttggtgaaaataattctactgaatatcaagactgcaggttttcgcaagtgtttctgccgggtgaatccccctgggaatcaaatttggagggtacatgcccacaagcaagggataaagctaaaatgagatacaatgagaaaaagaaaactcgaatgtatgtacctttaatgctctcaatatattatggtaaaatgaaatggaaactgttctttaaatttgtttaa

SEQ ID NO: 474 - protein, 384 aa, Glycine max
  GmBBX23 soybean B-box polypeptide
MDPLCEFCGVVRAVVYCKSDSARLCLHCDGCVHSANSLSRRHSRSLLCDKCNSQPAMIRCMDHKLSLCQGCDWNPNDCSALGHRRVALNCYTGCPSLAEFSRIWSFVFDANSSLGGWESVGTLPKSESCTSQCLEQTDHNGGSFGLSQIIPSNPNYTPFCKDEAFFFPQDSNQPKECPNLGIHDGSELCEGFNVDNLQLNFESADEIFGCSQDATRYHLEDGGMDCLLMDKNISVTESNSLIESALEASSSIQQDCVAFQSSRAGGSASVMQVINSNTNSALMNPSCTRNISLGFPQGVHSKMPLQFPNIVGENNSTEYQDCRFSQVFLPGESPWESNLEGTCPQARDKAKMRYNEKKKTRMYVPLMLSIYYGKMKWKLFFKFV

SEQ ID NO: 475 - DNA, 1272 bp, Glycine max
  GmBBX24
atggatcctctatgtgagttttgtcgggtggtgagagctgtggtttactgtaagtcagattctgctcgtctctgcttgcattgcgatggctgtgtacactctgcaaattctttgtctcgcaggcattcgcgttccctcctatgcgataagtgcaattcccagccggcaatgatccgctgcatgaatcataagttgtcattatgtcaaggttgtgactggaatccaaatgactgttctgcattgggacataggcgccttgcattgaattgctacactggttgcccctctttggctgagttttctaggctctggtcttttgtgtttgatgctaattcctcacttggtggttgggaatcggttggtactttgccaaaaagtgagagctgcactagccagtgtttggagcaaactgatcataatggtggttattttggtttggtgagtgacaagttggatgaaattgaatcttgtgtcagatatcaacctcggatggatcagtctcaaatcattccatcaaatccaaattacacaccgtactgcaaagacgaagcatttttctttcctcaagactcaaaccagccaaagctgcaggaatgtcctaatctaggaattcatgatgggaatgaactttgtgaaggtttcaatgtggataacgttcaattaaactttgaaattgctgatgaaatattttactgttcacaagttgccacaagataccaccttgaagatggaggaatggactgtttattgatggataaaaacatagcagttacagaatctagttcacttattgagagtgccatggaggcatcatcatctatccaacaagattgtgtggcttttcaatcatcgagggctggtgggtcagctagtgtgatgcaggttatcaacagcaataccaattgtgcacttatgaatcctagctgcactaaaaacatcagtctgggatttcctcagggcctagttcattcaaacatgccacttcaatttcccaacatagttggtgaaaataattctactgaatatcaagactgcgggttatcgcgagtgggtgaatccccctgggaatcaaatttggagggtacatgcccacaagcaagggataaagctaaaatgagatacaatgagaaaaagaaaactcgaacctttggtaagcaaataagatatgcttctcgcaaagcaagggccgatacaagaaaacgtgtgaaaggtagatttgttaaagcaggtgaagcatatgattatgaccctcttgggacaagggacatctaa

SEQ ID NO: 476 - protein, 423 aa, Glycine max
  GmBBX24 soybean B-box polypeptide
MDPLCEFCRVVRAVVYCKSDSARLCLHCDGCVHSANSLSRRHSRSLLCDKCNSQPAMIRCMNHKLSLCQGCDWNPNDCSALGHRRLALNCYTGCPSLAEFSRLWSFVFDANSSLGGWESVGTLPKSESCTSQCLEQTDHNGGYFGLVSDKLDEIESCVRYQPRMDQSQIIPSNPNYTPYCKDEAFFFPQDSNQPKLQECPNLGIHDGNELCEGFNVDNVQLNFEIADEIFYCSQVATRYHLEDGGMDCLLMDKNIAVTESSSLIESAMEASSSIQQDCVAFQSSRAGGSASVMQVINSNTNCALMNPSCTKNISLGFPQGLVHSNMPLQFPNIVGENNSTEYQDCGLSRVGESPWESNLEGTCPQARDKAKMRYNEKKKTRTFGKQIRYASRKARADTRKRVKGRFVKAGEAYDYDPLGTRDI

SEQ ID NO: 477 - DNA, 1050 bp, Glycine max
  GmBBX25
atgagtggtgaagcgcgatcctgtgactactgtggccactccacagcacttctttactgcagagccgattcagcaaaactctgtttctcgtgcgatcgcgaggttcactccaccaaccagctcttctcgaaacacacgcgcacgctgctctgcgacgcatgcgatcattcccctgccaccatactctgttccaccgacacctctgttctgtgccagaactgcgactgggagaagcacaaccctgcgctctccgattcccttcacgaacgaaggcccctcgaaggcttcactgggtgcccttcagtctccgaactcttatccatcgtggggttttcggatttaagcaaaaaatctcttctttcttcgcctcagggaagtggcgctgatgggatcttcggtggagaaattgaagggctttcggatttgtttgtgtgggattctccttctttcgttacgcttgatgatttgatttcttcttctccttcttctcatagctttcaggccatggaggttcctcctctgcccaagaatcggaaggctgcttgtgggcaacacaaagaagagattcttagtcagcttcgggaattggccaagtctgagccattggaccttgaaccatatgtgtcatcggggaacttgtcctcgggttttgaacgtgaaccagaggctgatatctttccttctcatgagtggcatagagaaagcagcgagcctatgtatcaggttgttcctcctgacccattaatgagaacttatacagaagaaattccatttaaacattctacttctgctgttggggaaactcaaacctacggtgacaatggaggaaaaccatccatttctcttaaatctgaaaccctatcaactactcccaaagctgcagcatgtgagttaacaagccaagaaagagattctgcattattacggtacaagcagaagaagaaaactaggagatttgacaaacacataaggtatgaatcacgaaaagttcgggcagaaagcagggtaagagtcaagggtcgatttgccaagatggaacatgaacattga

SEQ ID NO: 478 - protein, 178 aa, Glycine max
  GmBBX25 soybean B-box polypeptide
MSGEARSCDYCGHSTALLYCRADSAKLCFSCDREVHSTNQLFSKHTRTLLCDACDHSPATILCSTDTSVLCQNCDWEKHNPALSDSLHERRPLEGFTGCPSVSELLSIVGFSDLSKKSLLSSPQGSGADGIFGGEIEGLSDLFVWDSPSFVTLDDLISSSPSSHSFQAMEVPPLPKNR

SEQ ID NO: 479 - DNA, 1056 bp, Glycine max
  GmBBX26
atgagtggtgctgaagcgcgaccttgtgactactgtggcaactccacagcacttctctattgcagagccgattcagcaaaactctgtttctcgtgcgatcgcgaagttcactccaccaaccagctcttctccaagcacacgcgcacgctgctctgcgacgcatgcgatgattcccctgcgaccatactctgttcaaccgacacctctgttctgtgccagaactgcgactgggagaaccacaaccctgcgctctccgattcccttcacgagcgaaggcccctcgaaggcttcactgggtgcccttccgtctccgaactcttgtccatcgtggggttttcggatatcagcaaaaaatctctgcttttttcgcctcagggaagtgtcgctgatgggttcttcggcgccagcgagattgaagggctttcggatatgttcgtgtgggatgcgccttcttttgttacgcttgatgatttgatttcttcctctccttcttctcatagctttcaggccatgaaggttcctcctctgcccaagaatcgaaaggctgcttgtgggcaacacaaagaagagattcttagtcagcttcgggaattggccaagtctgagcctttggaccttgaaccatatgtgcaatcgggtaacttgtccttgggttttgaacgtgacccggaggctgatatctttccttctcatgagtggcatagagaaagcagcgagcctatgcatcaagttgtgcctcctgacccatcaatgggaacttatactgaagaaattccagttaaacattctacttctgctgttggggaaaatcacacctatggtgacaatgaagggaaaccatccatttctctcaagtctgaaaccctatcaactactcccaaagctgcagcatgtgagttaacaagccaagaaagagattctgcattattacggtacaagcagaagaagaaaacaaggagatttgacaagcacataaggtatgaatcacgaaaagttcgggctgaaagcagggtaagagtcaagggccgatttgccaagatgggacatgaacattga

SEQ ID NO: 480 - protein, 351 aa, Glycine max
  GmBBX26 soybean B-box polypeptide
MSGAEARPCDYCGNSTALLYCRADSAKLCFSCDREVHSTNQLFSKHTRTLLCDACDDSPATILCSTDTSVLCQNCDWENHNPALSDSLHERRPLEGFTGCPSVSELLSIVGFSDISKKSLLFSPQGSVADGFFGASEIEGLSDMFVWDAPSFVTLDDLISSSPSSHSFQAMKVPPLPKNRKAACGQHKEEILSQLRELAKSEPLDLEPYVQSGNLSLGFERDPEADIFPSHEWHRESSEPMHQVVPPDPSMGTYTEEIPVKHSTSAVGENHTYGDNEGKPSISLKSETLSTTPKAAACELTSQERDSALLRYKQKKKTRRFDKHIRYESRKVRAESRVRVKGRFAKMGHEH

SEQ ID NO: 481 - DNA, 702 bp, Glycine max
  GmBBX27
atgatgaatggttctccaaattcaaaacagagaacatgtgactattgcgggagcttcacggctcttctgtactgcagagccgattctgcgaagctttgtttcttctgtgaccgtaaagttcacttcccaaaccagcttttctcgaagcacaagcgcgcgcagctctgtgatgcgtgtggagattcccctgcctcggtgctctgttctgcagaaaactctgttctgtgccaaaactgtgattgcggaaagcaaaaacatttggtgtctgaggcgcaccaacggaggccactcgaggggttctcggggtgcccttctgtgactgagttgttaacaattctgggtctcagtgaaaaatctctgctttcaaatgagggaacttcccagattgatgatgacctttcggatttgcacgtgtggagtgctccttctattaatgggttgaaacgtaagggtgcgtgcgggagacacaaagaagagattcttagtcaactccgtgagctaataaagttggagcccgacttgattcatgctgaacgacaagggcaatttggaaatttgcctactgattttgaacgagacgtggaggctaatatatttccttcatatgagtgcacaaatgggtccctaaaacgaataattcaaatagatgaaaggactatagtagcctacgtttgtaatcaatcatcaagggctaaatgcaag

SEQ ID NO: 482 - protein, 177 aa, Glycine max
  GmBBX27 soybean B-box polypeptide
MMNGSPNSKQRTCDYCGSFTALLYCRADSAKLCFFCDRKVHFPNQLFSKHKRAQLCDACGDSPASVLCSAENSVLCQNCDCGKQKHLVSEAHQRRPLEGFSGCPSVTELLTILGLSEKSLLSNEGTSQIDDDLSDLHVWSAPSINGLKRKGACGRHKEEILSQLRELIKLEPDLIHA

SEQ ID NO: 483 - DNA, 666 bp, Glycine max
  GmBBX28
atgatgagtggttctccttctccaaattcaaaacagagaacatgcgactattgtggggacttcacggctcttctgtattgcagtgccgattctgcgaagctatgtttcttctgtgaccgcaaagttcactccccaaaccagcttttctccaagcacacgcgagcgcagctctgtgattcgtgtggagattcccctgcttcggtgctctgttctgcagagaactctgttctttgccataactgtgactgcgaaaagcacaaacatttggcgtctgaagtgcaccaacgaaaacccctcgaggggttctcggggtgcccttctgtgactgagttgttaacgattcttggtctttctgaaaaatctctgctttcaaatgaggggacttcccagattgattacgacctttcggatttgcacgaatctctagcaagtatattctcaggtgtgaacaatttctttatttggttgatattgttattgaatcagaatcgtaagagtgcgtttgggagacacaaagaagagattcttagtcaactccgtgagctaataaagttggagcccgacttgattcatggagaagtagatgctgagcgacaagggcaatttggaaatttgcctactggctttgaacgtgacgtggaggctagtatgtttccttcatatgag

SEQ ID NO: 484 - protein, 222 aa, Glycine max
  GmBBX28 soybean B-box polypeptide
MMSGSPSPNSKQRTCDYCGDFTALLYCSADSAKLCFFCDRKVHSPNQLFSKHTRAQLCDSCGDSPASVLCSAENSVLCHNCDCEKHKHLASEVHQRKPLEGFSGCPSVTELLTILGLSEKSLLSNEGTSQIDYDLSDLHESLASIFSGVNNFFIWLILLLNQNRKSAFGRHKEEILSQLRELIKLEPDLIHGEVDAERQGQFGNLPTGFERDVEASMFPSYE

SEQ ID NO: 485 - DNA, 1083 bp, Glycine max
  GmBBX29
atgttgccatgcgactactgcgactccaaacccgccttactcttctgccgagctgattccgctaaactctgtttagtttgcgaccagcacgtgcacgccgccaacgccctctccctcaagcacgtgcgcttccagatttgcgactcctgcaagtccgacaccgccgtcctccgctgctccacccacaacctcgtcctctgtcacaactgcgacgtggacgcccacggtgccgacgcttcatccctccaccaccaccaccaccaccaccgccgccttcacggcctctccggctgtccctccgtcccggagatcgcctccgcgctgggccttgatttccgggcccaggagcccgtggtccccaccgccgcctcccgcgatgaggtctatgagcaggtgctggaaattgcgcgccagaggaacaacggcctcggcgccgaacaactcaagttcgacgactcacccggaaacgacacgccgttcacctccttgcttatgttgcagaattctgaatctgagtttgacgctagaaaaagtaacgataacaacggttacggaaccgaggcatgggatcttcactggaattataataaccccgcgtatcagcctcctcaggtgtgggattttcaattacaaaaatcaacagattgcaatgaaccaagagttgatgtgcacaacatgaattactcaacaattggtgatgatattgatattctatcaagaaataatcaatcggatcagtcatcatcaagccatgcaaagaggaaagaagagagcaacaaaaaagctagaggtgggttatcatcagagtccacattgtttgaatccataccgtatagtggcaccaacaatgtcgttgtcatggagcatcttgtgggtgggaatgagaatgttagcaccttaaaagccagggttagtttgcaagagttggctaagaatagaggggatgccatgttacgctataaggagaagaagaaaacgcgaaggtacgacaagcacattcgctatgaatcaaggaaggccagggctgatactagaaaaagggtgagagggagatttgtgaaggcaagtgatgttcaagcatga

SEQ ID NO: 486 - protein, 360 aa, Glycine max
  GmBBX29 soybean B-box polypeptide
MLPCDYCDSKPALLFCRADSAKLCLVCDQHVHAANALSLKHVRFQICDSCKSDTAVLRCSTHNLVLCHNCDVDAHGADASSLHHHHHHHRRLHGLSGCPSVPEIASALGLDFRAQEPVVPTAASRDEVYEQVLEIARQRNNGLGAEQLKFDDSPGNDTPFTSLLMLQNSESEFDARKSNDNNGYGTEAWDLHWNYNNPAYQPPQVWDFQLQKSTDCNEPRVDVHNMNYSTIGDDIDILSRNNQSDQSSSSHAKRKEESNKKARGGLSSESTLFESIPYSGTNNVVVMEHLVGGNENVSTLKARVSLQELAKNRGDAMLRYKEKKKTRRYDKHIRYESRKARADTRKRVRGRFVKASDVQA

SEQ ID NO: 487 - DNA, 1146 bp, Glycine max
  GmBBX30
atgttgccatgcgattactgccattccaaacccgccatactcttctgcagaccagattccgctaaactatgcttgctatgcgaccagcacgtgcacgccgccaacgccctctccctcaagcacgtgcgcttccagatttgcgactcctgcaagaccgacaccgctgtcctccgctgctccaccgacaacctcgtcctctgccaccactgcgatgtggaaacccacggtgctgccgcttcctcccaccaccaacgtcaccgcctccacggcctctccggctgcccctccgtcacggagatcgtctccgcgctgtgcctcgatttccgggcccaggatcccgtggtccccaccgccgcctccggcggtcgcgatgaggtgtacgagcaggtgctggaaatcgcgcggcagaggaacgacgacctcggcgccgaacaactcaagttcgacgaatcccccataaacgacgtcgttgttgttgacgagatgctgatgcagcaaacgccgttcacgtctttgcttatgttgccaaattccgaatctgaattcgactcccgaaaaagtaacgataacaacggttacggaaccgaggcaggggatcttctctggaattataaccccgcgtatcagcctcctcaggtgtgggattttcagttacaaaaatcaagagattgccatgaaccaagagttgtaacatttgatggtctagaagttccaaaattatttcaggatgagcacaatatgaagtactcaacaattggtgatgacattgatattctatcaagaaataatcaatcggatcagtcatcatcaagccatgcaaagaagaaagaagagaacaacaaaaaagctaaaggtgggttatcatcagagtccaaactgtttgaatccataccgtacaatggcaccaacaatgtcgtagtcatggagcatcttgttggtgggaatgaaaatgttggcaccttaacagccagggttagtttggaagagttggctaagaatagaggggatgccatgttgcgttacaaggagaagaagaaaactcgaaggtacgataagcacattcgctatgaatcaaggaaggccagggctgatactagaaaaagggtgagagggagatttgtgaaggcaagtgatgttcaagcgtga

SEQ ID NO: 488 - protein, 381 aa, Glycine max
  GmBBX30 soybean B-box polypeptide
MLPCDYCHSKPAILFCRPDSAKLCLLCDQHVHAANALSLKHVRFQICDSCKTDTAVLRCSTDNLVLCHHCDVETHGAAASSHHQRHRLHGLSGCPSVTEIVSALCLDFRAQDPVVPTAASGGRDEVYEQVLEIARQRNDDLGAEQLKFDESPINDVVVVDEMLMQQTPFTSLLMLPNSESEFDSRKSNDNNGYGTEAGDLLWNYNPAYQPPQVWDFQLQKSRDCHEPRVVTFDGLEVPKLFQDEHNMKYSTIGDDIDILSRNNQSDQSSSSHAKKKEENNKKAKGGLSSESKLFESIPYNGTNNVVVMEHLVGGNENVGTLTARVSLEELAKNRGDAMLRYKEKKKTRRYDKHIRYESRKARADTRKRVRGRFVKASDVQA

SEQ ID NO: 489 - DNA, 570 bp, Glycine max
  GmBBX31
atgcgaacgctttgtgatgcttgtgagagtgcggcggctatagttttctgcgccgctgatgaggctgcactttgtcgtgcctgtgatgagaaggttcacatgtgcaataagctagctagtaggcatgtgagggttggtcttgcaagtccaagtgatgtgccacggtgtgacatatgtgagaatgcaccagctttcttctattgcgagacagatggaagttccctttgtttgcagtgtgatatgattgttcatgttggtggtaaaagaacgcatggaagatatcttctgttcaggcaaagagttgagtttccaggagataaatctagtcatgctgaaaatccggcttcacaagcattggaaccaggtgaggctaaaagaggacaaaatccacttcccaagctaaaaatgggagagaaacaacaaaatcacaggatgcctatggttccaacaccaggacctgatgctgatgggcaaaccaagatggaaactaaaatgattgatttgaacatgaagcctaatagaatacatgaacaagcatcaaataaccaggttagagttcatgggaagtaa

SEQ ID NO: 490 - protein, 189 aa, Glycine max; identical to SEQ ID NO: 230
  GmBBX31 soybean B-box polypeptide

SEQ ID NO: 491 - DNA, 555 bp, Glycine max
  GmBBX33
atgcgaacgctttgtgatgcttgtgagagcgccgcggctatagttttctgcgccgctgatgaggctgcactttgtcgtgcctgtgatgagaaggttcacatgtgcaacaagctagctagtaggcatgtgagggttggtcttgctagtccaagtgatgtaccacggtgtgacatatgtgagaatgcacctgctttcttctattgcgagacagatggaagttccctttgtttgcagtgtgatatgattgttcatgttggaggtaaaagaacgcatggaagatatcttctgttcaggcaaagagttgagtttccaggagataaatctagtcatgctgaaaatccggcttcacaaccattggaaccaggtgaggctaaaagaggacaaaatccacttcccaaactaaaaatgggagagaagcaacaaaatcacaagatgcctatggttccaacgccaggacctgatgctgatgggcatgccaagatggaaagtaaaatgattgatttgaacatgaagcctaatagaatacatgaacaagcatcaaataatcagccataa

SEQ ID NO: 492 - protein, 184 aa, Glycine max; identical to SEQ ID NO: 222
  GmBBX33 soybean B-box polypeptide

SEQ ID NO: 493 - DNA, 639 bp, Glycine max
  GmBBX34
atgcgaaccctttgcgacgtatgcgagagcgccgctgccattgtcttctgcgccgctgatgaggctgctctctgctccgcttgtgaccacaagatccatatgtgtaacaaacttgctagtagacacgttcgggttggccttgctgaccccactgatgttccacgctgtgacatatgtgaaaacgcacctgctttcttttactgtgagatagatggtagttcgctgtgtctgcaatgtgatatgattgtgcatgttggtggtaaaagaactcatggaagatatcttctattgaggcaaagagttcagtttccatgtgataaacctgcccaaatggaagaactagggctgcaacctatggatcaaaatgaatcaaggagggatgaaagtcagtcactcaagctaaaaataagagatagtcagcagaatcacagtgtctcacctgttccaagacaagaaaataatattgatggtcatggaaaaatggataaaaagttaattgatcttaatacgaggccactgcggttaaatggagcagcaccaaacaaccaggaacgaggtatggatattttaagaggcaataatcataaatctgcgagtgtgccaccagtagaatccttcaaacaagagtctgagaagtaa

SEQ ID NO: 494 - protein, 90 aa, Glycine max
  GmBBX34 soybean B-box polypeptide
MRTLCDVCESAAAIVFCAADEAALCSACDHKIHMCNKLASRHVRVGLADPTDVPRCDICENAPAFFYCEIDGSSLCLQCDMIVHVGGKRT

SEQ ID NO: 495 - DNA, 639 bp, Glycine max
  GmBBX35
atgcgaaccctttgcgacgtatgcgagagcgccgctgccattctcttctgcgccgctgatgaggccgctctctgctccgcttgtgaccacaagatccatatgtgtaacaaacttgctagtaggcatgttcgagttggccttgctgaccccactgatgttccacgctgtgacatatgtgaaaatgcacctgctttcttttactgtgagatagatggtagttcgctgtgtctgcaatgtgatatgattgtgcatgttggtggtaaaagaacccatggaagatatcttctattgaggcaaagagctcagtttccaggtgataaacctgcccaaatggaagaactagagctgcaacctatggatcaaaatgaatcgagaagggatgaaagtcagtcactcaagctaaaaacaagagatagtcagcagaatcacagtgtctcaccttttccaaggcaagaaaataatattgatggtcatggaaaaatggataaaaagttaattgatcttaataccaggccactgcggttaaatggatcagcaccaaacaaccaggaacaatgcatggatattttaagaggcaataatcatgaatctgccagtgtgccaccagtagaatccttcaaacaagagtctgagaagtaa

SEQ ID NO: 496 - protein, 212 aa, Glycine max; identical to SEQ ID NO: 232
  GmBBX35 soybean B-box polypeptide

SEQ ID NO: 497 - DNA, 801 bp, Glycine max
  GmBBX36
atgaagatccactgcgacgtgtgtaacaagcaccaggcctctttcttctgcaccgccgacgaagctgccctatgcgacggctgcgaccaccgcgtccaccacgccaacaagctcgcctccaaacaccaacgcttctccctcacccacccctctgcgaaacattttcccctctgcgatgtttgccaggagagaagagccttcgtgttttgtcagcaagatagagcgattctgtgcaaagagtgtgacgtgcccattcattctgccaacgacctcaccaagaaccatagcaggtttcttctcactgggattaagttctctgcttctgccacgccttatgattattcatcaccaccaccaccaccaccaccaccaccacccaagagaaaccctgttctcgattctccttcaacaccgtcaccgcctaagcctgggggaaactcgctaacaaacgaagaagaacctggtttcacaggtagcagcatttcagagtacttgataaactctatcccaggcatgaagttcgaagatttcctcgattcacattctcttccctttgcttgctccaagaatagtgatgacatgttgtcgctgtttggtgagggaaacatggtttctttctcacccggtgggttctgggttcctcaagcaccaccatcttcagtacaaatggatcggcagagtgggtacagagagacaagggaaggtagcattagatcaagttttggagatgataatttcatagttccacagatgagtcctcccagcaatgtgtctaataagagatccaggcttctctggtaa

SEQ ID NO: 498 - protein, 266 aa, Glycine max; identical to SEQ ID NO: 90
  GmBBX36 soybean B-box polypeptide

SEQ ID NO: 499 - DNA, 738 bp, Glycine max
  GmBBX37
atgaagatccagtgcgacgtgtgtaacaaacagcaggcatcgttgttctgcaccgccgacgaagccgccctatgcgacggctgcgaccaccgcgtccaccacgccaacaagctcgcctccaaacaccaacgcttctccctcagccacccctctgcaaaacattttcctctctgcgatgtttgccaggagagaagagcctttgtgttttgtcagcaagatagagcgattctgtgcaaagagtgtgacgtgcccgttcattctgccaacgacctcaccaagaaccataacaggtttcttctcactgggattaagttttctgccctcgattctccttcaacacctcctaagcctgcaggtggaaactccctaacaaatcaacaaccacaacaacaaactggtttcacaggtagcagcatatcagaatacttgataaacactatcccaggcatggagttcgaagatttcctcgattcacattctcttccctttgcttgctccaagaatagtgatgacatgatgttgtcgatgtttggtgagggaaacatggtttcgttctcagccggagggatctgggttcctcaagcaccatcttcagtacaaatggatcagcagagtgggtacaaagacacatgggaaactagcattagatcaagttttggggatgatagtttattagttccacagatgactcctcccagcaatgtgtttaataataagagatccaggcttctatggtaa

SEQ ID NO: 500 - protein, 245 aa, Glycine max; identical to SEQ ID NO: 96
  GmBBX37 soybean B-box polypeptide

SEQ ID NO: 501 - DNA, 831 bp, Glycine max
  GmBBX38
atgaagatccagtgcgacgtgtgcaacaaacacgaggcctccgtcttctgcacagccgacgaagccgccctctgcgacggctgcgaccaccgtgtccaccatgccaacaaactcgcctccaaacaccaacgcttctctcttctccgcccttctcataaacaacaccctctctgcgatatttgccaggagagaagagccttcacgttctgtcagcaagacagagcgattctctgcaaagagtgtgacgtgtcaattcactctgccaacgaacacacccttaagcacgataggttccttctcactggtgttaaactcgcagcttctgccatgcttcgttcatcacaaactacctctgattcaaactcaaccccttctcttcttaacgtttcacatcaaactactccacttccatcttccaccaccaccaccaccaccaacaacaacaacaacaaggttgctgttgaaggaactggttcaacgagtgctagcagcatatcagagtatttgatagagactcttcctgggtggcaagttgaggactttctcgattcatattttgttccctttggtttctgtaagaatgatgaagtgttgccacggttggatgctgacgtggaggggcatatgggttcgttttcaaccgagaacatggggatctgggttcctcaagcgccaccacctcttgtgtgttcttcacaaatggatcgggtgatagttcaaagtgagaccaacatcaaaggtagcagcatatcgaggttgaaggatgatactttcactgttccacagattagtcctccctccaattccaagagagccagatttctatggtag

SEQ ID NO: 502 - protein, 276 aa, Glycine max; identical to SEQ ID NO: 100
  GmBBX38 soybean B-box polypeptide

SEQ ID NO: 503 - DNA, 837 bp, Glycine max
  GmBBX39
atgaagatccagtgcgacgtttgcaacaaacacgaggcctccgtcttctgcaccgccgatgaagccgccctctgcgacggctgcgaccaccgtgtccaccatgccaacaaactcgcctccaaacaccaacgcttctctcttctccgcccttctcctaaacaacaccctctctgcgatatttgccaggagagaagagcctttacattctgtcagcaagacagagcgattctctgcaaagagtgtgacgtgtcaattcactctgccaacgaacacacccttaagcacgataggttccttctcaccggtgttaaactttctgcttctgctatgcttcgttcgtcagaaactacctctgattcaaactcaaacccttctcttcttaacttttcacaccaaacaacattactacctccatcttccaccaccaccaccaccaccagcaacaacaacaacaacaaggttgctgttgaaggaactggttcaactagtgctagcagcatatcggagtatttgatagagactcttcctgggtggcaagttgaagactttcttgattcatattctgttccctttggtttctgtaagaatgatgaagtgttgccacggtttgatggtgaaatggaggggcatctgagttctttctcaaccgagaacatggggatctgggttcctcaagcgccaccaactcttatgtgttcttcacaaatggatcgggtgatagttcacggtgagaccaatatcaaaggtagcagcagatcaaggttgaaggatgataatttcactgttccacagattagtcctccttccaattccaagagagccagatttctgtggtag

SEQ ID NO: 504 - protein, 278 aa, Glycine max
  GmBBX39 soybean B-box polypeptide
MKIQCDVCNKHEASVFCTADEAALCDGCDHRVHHANKLASKHQRFSLLRPSPKQHPLCDICQERRAFTFCQQDRAILCKECDVSIHSANEHTLKHDRFLLTGVKLSASAMLRSSETTSDSNSNPSLLNFSHQTTLLPPSSTTTTTTSNNNNNKVAVEGTGSTSASSISEYLIETLPGWQVEDFLDSYSVPFGFCKNDEVLPRFDGEMEGHLSSFSTENMGIWVPQAPPTLMCSSQMDRVIVHGETNIKGSSRSRLKDDNFTVPQISPPSNSKRARFLW

SEQ ID NO: 505 - DNA, 960 bp, Glycine max
  GmBBX40
atgaagatccagtgtgctgtgtgtgacaaagtggaagcctccgtcttctgctctgcagatgaagctgctctttgccatagttgtgaccgcaccattcaccacgccaacaagcttgcaaccaaacacccacgcttctctctccattaccccacctcccaagacttccctctttgtgatatttgccaagagaggcgtgcatatctattttgccaagaagacagggcattgctatgcagggagtgtgacgttcctatccacagggcgaatgagcatacccagaagcataacaggtttcttctcaccggagtgaagctctctggtacttctttggatcctgctgcgtcctccaccaattgcacccatggctctgaaggaagaaacaacgctcgatctagaatgaacagacccagatcatcagtttccaatgaagaaaatgcaagtaattcttcttgcaaggttgaagacaacgtggctagtgacactggttcggtttcaactagcagcatttctgagtacttgatcgaaacaatacccggttactgttttgaagaccttcttgatgcttcatttgcacctaatggtttctgtaagaaccagaactatgatcgtcataggcgtttcaggaccaagatcttcaagttattaggacgtgtttggtttgagttaaggagattccaaaatcttaacgctatcgatgatcaactgtttgtaaaaatctgttggaaaatatcttcttttgtttttgttatttgcatttctttttgggctccctgctgcattctttatgatttttttttcattctctattcccgaccactgtttcggcctcttattttagtatttttttcaattttcattgggttaattaataatattttttgggggggggtccatgcttttattgacatgaacatgaattcattgaataacgcaactgaatattatgtgccactttcttaa

SEQ ID NO: 506 - protein, 319 aa, Glycine max; identical to SEQ ID NO: 88
  GmBBX40 soybean B-box polypeptide

SEQ ID NO: 507 - DNA, 702 bp, Glycine max
  GmBBX41
atgaagatccagtgtgatgtgtgtgacaaagtggaagcctccgtcttctgtcctgcagatgaagctgctctttgccatagctgtgatcgcaccattcaccgcgccaacaagcttgcaaccaaacacgcccgtttctctctccactaccccacctccaaagacttccctctttgtgatatatgccaagagaggcgtgcatatctattttgccaagaagacagggcgttgttatgcagggaatgcgacgttcctatccacagagccaatgagcatacccaaaagcataacaggtttcttctcacgggtgtgaagctctctggtacttgtttagatcctgcttcgtcctccaccaattacaccaataataatagagtcactggctctgaaggaagaaacgacgctcgatctagaatgaacagacccagatcatcagtttccaatgaagaaaatgcaagtaattcttcttgcaaggttgaagacaacgtggctagtgacactggttcgatttcaactagcagcatttctgagtacttgattgaaacaatacccggttactgttttgaagacctccttgatgcttcgtttgcacctaatggtttctgtaagaagcagaactttgatcatccctgggcgtttcaggaccaaaagcgaacaagtggagacactatggccgtgccgttcctgaaactagtcatccattga

SEQ ID NO: 508 - protein, 233 aa, Glycine max
  GmBBX41 soybean B-box polypeptide
MKIQCDVCDKVEASVFCPADEAALCHSCDRTIHRANKLATKHARFSLHYPTSKDFPLCDICQERRAYLFCQEDRALLCRECDVPIHRANEHTQKHNRFLLTGVKLSGTCLDPASSSTNYTNNNRVTGSEGRNDARSRMNRPRSSVSNEENASNSSCKVEDNVASDTGSISTSSISEYLIETIPGYCFEDLLDASFAPNGFCKKQNFDHPWAFQDQKRTSGDTMAVPFLKLVIH

SEQ ID NO: 509 - DNA, 648 bp, Glycine max
  GmBBX42
atgaagatccagtgtgatgtgtgccacaaagaagtggcctccttcttctgcccctcagatgaagcctctctctgccatgcttgtgatcgcaccatccaccatcccaacaagctctcagaaaaacacaaacgcttctctcttcaccaccccatttccaccaaagactctcctctttgtgatatctgtcataatgctcaactcattattattcctttccaggagaagcatatggcttgtgacaaggtttcggtttcaacaagcagcatttctgagtacttgattcagaccattcccggttattgcatggaagatcttctagatgcttcattcgcatccaatagtttatctaaggattatgagcaccaatcagcgtttcagaaccaagatgttcaagtcagcatgcgttcgttcccactgcaaacttgggtaccacaatctcaaggtggatcccctcaacgtagctttacttcgaatctttatccccagattgattctttagttggagtgatggaaatgcctaaagccaaagctggtgaaggatactccaattggatatataattatgactacgcagcttacaaacttccttcaatttgtcctccattgatcaaaaaaatgcaaacgctctcgttaatcaattgtatgtga

SEQ ID NO: 510 - protein, 215 aa, Glycine max
  GmBBX42 soybean B-box polypeptide
MKIQCDVCHKEVASFFCPSDEASLCHACDRTIHHPNKLSEKHKRFSLHHPISTKDSPLCDICHNAQLIIIPFQEKHMACDKVSVSTSSISEYLIQTIPGYCMEDLLDASFASNSLSKDYEHQSAFQNQDVQVSMRSFPLQTWVPQSQGGSPQRSFTSNLYPQIDSLVGVMEMPKAKAGEGYSNWIYNYDYAAYKLPSICPPLIKKMQTLSLINCM

SEQ ID NO: 511 - DNA, 867 bp, Glycine max
  GmBBX43
atgaagatccagtgtgatgtgtgtcacaatgaagttgcttcctttttctgcccctctgatgaagcctctctctgccatgcttgtgatcgcaccatccaccatgccaacaagctcgcagacaaacacaaacgcttctcccttcaccaccccacttccaaagactcccctctttgtgatatctgtcatgagaggcgtgcatatcttttttgcaaagaggacagagcaatactatgtagagaatgtgatctttctattcatggggtcaacgaacataccaagaaacacaacaggtttcttctcactggcgtaaagatcggtgctgatgcttcagacccaacatcactttcctcaaatgacactgccattgaagaaagaacaacctctagttctaaaataaacagaccaataagttctttgtcaaatgagaatatcagttcttctcccacggttggagacaacatggcttgtgacacgggttcggtttcaactagcagcatttctgagtacttgattcagaccattcccggttactgcatggaagatcttttagatgcttcatttgcatctaatggtttatctaaggattatgagcaccaatcagcgtttcagaaccaagatgttcaagtcagcatgtgttcgtttccactgcaaagttgggtaccacaatctcaagctggatcccctcaactaattagcactacctcgaatcttcatccccagattaattctttagttggagtaatggaaatgcctaaagccaaagctagtgaaggatactccaattgcatatataattatgactactcagcttacaaagttccttcaatttgtcctccattgatcaaaaaatgtaaacgctctcgttaa

SEQ ID NO: 512 - protein, 288 aa, Glycine max; identical to SEQ ID NO: 98
  GmBBX43 soybean B-box polypeptide

SEQ ID NO: 513 - DNA, 879 bp, Glycine max
  GmBBX44
atgaagattcagtgcaacgtgtgcgaggccgcggaggccaaggttctgtgctgcgcggacgaggcagcactgtgctgggaatgcgacgagaaggttcacgcagcaaacaagctcgccagcaagcaccagagggtccctctctctctctccgcctctcacatgcccaagtgtgacatatgccaggaaatggttggttatttcttctgtttagaggatcgagctttgctatgtaggaattgtgatgtatctatacatacagcaaatgcctgtgtctctgatcatcaaaggtttttgcttactggtgtgagagtaggccttgaagctactgagcgcggtgcttcctcgtcttctgtgaagtcacagtctggggagaaaatgtctgatgctaaatcttcatccatctccagaaatgtttcctcactgccccagccatcaaatgccaatgaagtgttacccctccaaatgcaaggagttgaggagtttccaccaagcaatttctcaggttatacttctggaaacgtctcacaatggcccattgaagaatttctcggattaaatgaactcagtcagtattataattacatggatggatcatctaaggctgacagtggtaaacttggggattctgattcttctgttttgaggtctggtgaagaggatatggatgatgacggcttcttgggacgtgttccagattcatcctggacagttcctcagatcccttcccctcctacagcttcgggtttatattggccgaaagtccctcaatatacatctgacagtgccatgtctgttcctgacatatgcttttctcatgtgcgacagccccaccatgcccagcataattctaatgtttccaaaaggcgtaggcaactataa

SEQ ID NO: 514 - protein, 292 aa, Glycine max
  GmBBX44 soybean B-box polypeptide
MKIQCNVCEAAEAKVLCCADEAALCWECDEKVHAANKLASKHQRVPLSLSASHMPKCDICQEMVGYFFCLEDRALLCRNCDVSIHTANACVSDHQRFLLTGVRVGLEATERGASSSSVKSQSGEKMSDAKSSSISRNVSSLPQPSNANEVLPLQMQGVEEFPPSNFSGYTSGNVSQWPIEEFLGLNELSQYYNYMDGSSKADSGKLGDSDSSVLRSGEEDMDDDGFLGRVPDSSWTVPQIPSPPTASGLYWPKVPQYTSDSAMSVPDICFSHVRQPHHAQHNSNVSKRRRQL

SEQ ID NO: 515 - DNA, 1125 bp, Glycine max
  GmBBX45
atgaacctcgtggccgcaaaaaatatccttcatttttttcttctttctcttctccgccacttcttaaaccctgctcctctgcttcgtggtgccccaaacctcttcttctctttcttttccctctctcaattccaaacagtagatttagacacccttttggaaaaggaagtgttttttgagggaaaggagggaattttttgtgtgggagggtggaacccggaattcggtttggttggggtagagaggatgaagattcagtgtaacgtgtgtgaggctgcggaggccaaggttctttgttgtgctgatgaggctgggctgtgttgggagtgtgatgagaaggttcatgcggctaacaagcttgccagcaagcaccagagagtgcctctttctacctcttcctctcatatgcctaaatgtgacatttgtcaggaagcattaggctattttttctgtctagaagatcgggctctgctctgcagaaaatgtgatgtggcaatacacactgcaaatgcttatgtctctggtcatcagaggtttcttctaactggtgtaagagtaggccttgaagctacagaccctggtgcttcctcaacttctttgaagtcagattctggggagaaagtttcagattcttctgtctctagaaaggtttccacagcgccccagccatcaaattataatgaagtgttacccgctgaagttggaggagttggggagtttccatcagccaaggtgtcctttggtggtggttccacagctggaaatatctcacagtggactattgatgaatttattggcttaaacgagttcagtcagaattatgattacatggaaggatcatcaagggctgacggtggtaagcttggggattctgattctcctgttttaagatctggtgaagaggaaatggaggaggaggatgactatttggaacgcgttccagattcgtcgtggacagtcccgcagatcccttccccacctacttcttctgggttatgctggccaaaagaccatactaatctgtatggttcatctgatagtgttctgtttgttcctgacataagcttctctcacctgcaacaatctcagattagtatttttttgagacgccggaggcagctttaa

SEQ ID NO: 516 - protein, 374 aa, Glycine max
  GmBBX45 soybean B-box polypeptide
MNLVAAKNILHFFLLSLLRHFLNPAPLLRGAPNLFFSFFSLSQFQTVDLDTLLEKEVFFEGKEGIFCVGGWNPEFGLVGVERMKIQCNVCEAAEAKVLCCADEAGLCWECDEKVHAANKLASKHQRVPLSTSSSHMPKCDICQEALGYFFCLEDRALLCRKCDVAIHTANAYVSGHQRFLLTGVRVGLEATDPGASSTSLKSDSGEKVSDSSVSRKVSTAPQPSNYNEVLPAEVGGVGEFPSAKVSFGGGSTAGNISQWTIDEFIGLNEFSQNYDYMEGSSRADGGKLGDSDSPVLRSGEEEMEEEDDYLERVPDSSWTVPQIPSPPTSSGLCWPKDHTNLYGSSDSVLFVPDISFSHLQQSQISIFLRRRRQL

SEQ ID NO: 517 - DNA, 717 bp, Glycine max
  GmBBX46
atgaaaattcagtgcgatgtgtgtgagaaagccccggcaaccgtgatttgctgcgcagatgaggcagctttgtgtgccaaatgtgacgttgaagttcatgctgcaaacaagcttgcaagcaagcaccagaggcttctccttcaatctttatctaacaagcttcccagatgtgacatatgtcaagataagccagctttcatattttgtgttgaggacagagcactcttctgtaaagactgtgatgaacctattcatttagccagtagcctttctgcaaaccaccagcgcttccttgctactggtatccgggtggctttgggttctaattgcaccaaaggcaatgaaaaaggtcacgtggaaccatctaaaccaaaagcacaagaagttcctgcgaaaattccttctcagcaagtgcctagcttcacatcctcttgggcagttgatgacttgttggaattaacagactttgaatcaccagacaaagttcagaagcaatcccttgagtttggagaacttgaatggctagcagatgtaggcctttttggtgaacagtttcctcatgaagctttagcggcggctgaagttcctcagcttccaatgactagcagtgttggctcacacaaagcccccaaatccttgttgtcttacaaaaagcctaggattgaagtcctagatgaagatgatgatgagcacttcaccgtaccagatctcggataa

SEQ ID NO: 518 - protein, 238 aa, Glycine max; identical to SEQ ID NO: 188
  GmBBX46 soybean B-box polypeptide

SEQ ID NO: 519 - DNA, 717 bp, Glycine max
  GmBBX47
atgaagattcagtgtgatgtgtgtgagaaagcccctgcaaccgtgatttgttgcgcagatgaggcagctttgtgtgccaaatgtgacgttgaagttcatgctgcaaacaagcttgcaagcaagcaccagaggcttctccttcaatgtctatcaaacaagcttcccagatgtgacatatgccaagataagccagctttcatattttgtgttgaggacagagcactcttctgtaaagactgtgatgagccaattcatttagccagtagcctttctgcaaaccaccagcgcttcctcgctactggtatcagggtggctttgggttctaattgcaccaaaggccatgaaaaaggtaacatggaaccatctaatccaaatgcacaagaagttcctgtgaaaactccttctcagcaagtgcctagcttcacatcctcttgggcagttgatgacttgttggaattaacagactttgaatcgccagacaaaaagcaatccctggaatttggagaacttgaatggctagcagatgcaggccttttcagtgaacagtttcctcatgaagctttagtcgcagctgaagttcctcagcttccagtgccacacactagcagtgttgcctcacataaagcccccaaatccttggtgtcttacaaaaagcctaggattgaagtcctggatgaagatgatgatgaacactgcactgtcccggatctcggataa

SEQ ID NO: 520 - protein, 92 aa, Glycine max
  GmBBX47 soybean B-box polypeptide
MKIQCDVCEKAPATVICCADEAALCAKCDVEVHAANKLASKHQRLLLQCLSNKLPRCDICQDKPAFIFCVEDRALFCKDCDEPIHLASSLSA

SEQ ID NO: 521 - DNA, 720 bp, Glycine max
  GmBBX48
atgaaaattcagtgtgatgtgtgtgagagagctccggcaacagtgatttgttgtgcggatgaggcagctttgtgtgccaaatgtgacgttgaagttcatgctgcaaacaagcttgcaagcaagcaccaaaggcttcttcttcaatgtctatcaagcaagcttccaagatgtgacatttgccaagacaagccagcattcatattttgtgttgaagacagagcactcttctgtcaggattgtgatgaaccaattcattcagccggaagcctttctgcgaaccaccagcgcttccttgctactggtatccgagtggcatcgagttctaattgcaccaaggacaatgaaaaaagtcacttggagcctcctactaggaatgcacaacaagtttctgcgaaaattcctcctcagcaagtgcctagcttcacttcctcttgggctgttgatgacttattggaactaacagcctttgaatcacctgagaaaaaggaatctctgcagtttggagagctggaatggcttacagatgtgggtatttttggtgaacaatttgctcaggaagccttggctgcagctgaagtacctcagcttccagtaactcataacagtagcagtgttgcttcatacagaacttccaaatcctacatgtcccacaaaaagcctaggattgaagtcctaaatgatgatgatgatgagtattttactgtgcctgatcttggctaa

SEQ ID NO: 522 - protein, 239 aa, Glycine max; identical to SEQ ID NO: 190
  GmBBX48 soybean B-box polypeptide

SEQ ID NO: 523 - DNA, 723 bp, Glycine max
  GmBBX49
atgaaaattcagtgtgacgtgtgtgagagagctccagcaacagtgatttgttgcgcggatgaggctgctttgtgtgccaaatgtgacgttgaagttcatgctgcaaacaagcttgcaagcaagcaccaaagacttcttcttcaatgtctatcaagcaagcttcccacatgtgacatttgccaagacaagccagcattcatattttgtgttgaagacagagcactcttctgtcaggattgtgatgaaccaattcattcagccggaagcctttccgcgaaccaccagcgcttccttgctactggtatccgagtggcctcgagttctaattgcaccaaagacaatgaaaaaagtcactcggagcctcctaataggagtgcacaacaagtttctgcgaaaattcctcctcagcaagtgcctagcttcacatcctcttgggctgttgatgacttattggaactaacaggctttgaatcacctgagaaaaaggaatctctgcagtttggagagctggaatggcttacagatgtgggtattttcggcgaacaatttgctcaggaagccttggctgcagctgaagtacctcagcttcccgaaactcataacagtagcagtgttgcttcatacaaaacctccaaatcctacatgtcccacaaaaagcctaggattgaagtcctaaatgatgatgatgatgatgagtattttactgtgcccgatctcggctaa

SEQ ID NO: 524 - protein, 92 aa, Glycine max
  GmBBX49 soybean B-box polypeptide
MKIQCDVCERAPATVICCADEAALCAKCDVEVHAANKLASKHQRLLLQCLSSKLPTCDICQDKPAFIFCVEDRALFCQDCDEPIHSAGSLSA

SEQ ID NO: 525 - DNA, 1317 bp, Glycine max
  GmBBX50
atggagaaggtttgtgaattctgcacagctttgaggccacttgtttactgtaaggctgatgcagcatatctttgtctttcctgtgatgcaaaggtgcatttagcaaatgcagtgtccggccggcacctccggaacctcgtgtgtaactcatgcggataccaccttgcttatgttctgtgtttggaacacaaaatgttgatatgtcgtgactgtgaccaaaagttgcacaacatttctttgccacataagaaacgagctatcagaagtttcatgggttgcccttctgctaaagactttgcagcactctggggggttgaattgaatgagattgaaaacagtgccagtcaggatcagtttgattcagtttcttgtgtttctgcagatttaaatgttgcacaagtttcaggaaagcctggcattcaaactgaggtcccttcaatgctatctggggccaaacttgatgggggaggatcaaccagtcaacaaggtcagatattgtatagtgatcaaaagcgtcaaacgattctgcagcagattattgattttaaatggcttcaacaaaatgaggagattgattattctgcaaagatcaataggctacaagaaaaagattcatctccttcagtatatcagactcttaagaaattggacgacaaattcaatgagcaagcacaaaattcccaagatcttgctactaatgttctggaaaaagactgtcccattatggagctgaatcctgaaactttgccttctacgttttctcaacttgacaatttatattcttcttcaactatcgatcttcccttgcatggagaattgttctggacatgcaaaagtccacttcaaagtaatcagttgtggtcccaaaatattcaagaccttgggatatgcaaagaacttgtttgtcaagatgattttaacatccctgatgttgacttaactttccaaaactatgaggaactatttggaggagatcaagatccaattagaatactgcttgatgatcaagatgtctcctgctcttctttagagaaggataagtcagttgacaagtcagttattgacaatccaagtgcaatggaggaatcttctgcagctgcgtccattactatctcccaatctgatcttgacaacaaggatatgaatcctctcagccagtactgtccaagaagcatggatcctgctcatgcaattcgaccatttgattcaactataccattctctgttctgagattcaatgaggaaagcagttgcacaaaccatgatgacagtgccctttctccctacagtgaagggagggcttattcaggtagttaa

SEQ ID NO: 526 - protein, 172 aa, Glycine max
  GmBBX50 soybean B-box polypeptide
MEKVCEFCTALRPLVYCKADAAYLCLSCDAKVHLANAVSGRHLRNLVCNSCGYHLAYVLCLEHKMLICRDCDQKLHNISLPHKKRAIRSFMGCPSAKDFAALWGVELNEIENSASQDQFDSVSCVSADLNVAQVSGKPGIQTEVPSMLSGAKLDGGGSTSQQGQILYSDQKR

SEQ ID NO: 527 - DNA, 1317 bp, Glycine max
  GmBBX51
atggagaaggtttgtgaattctgcacagctttgaggccacttgtttactgtaaggctgatgcagcatatctttgtctatcctgtgattcaaaggtgcatttagcaaatgcagtgtctggtcggcacctccggaactttgtgtgccactcatgcggataccatcttgcttatgttctgtgtttggaacataaaatgttgatctgtcgtgactgtgatcaaaagttgcataacatttctttaccacataagaaacgagctatcagaagtttcatgggctgcccttctgctaaagactttgcagcactctgggggtttgaatcgaatgagattgaaaacagtgccactcaggatcagtttggttcagtttcttgtgtttctgcagatttgaatgttgcacaagtttcaggaaagcctggcattcaaactgggatcccctcaatgccatctggagccaaatttgatgggggaggatcaaccagtcaacaaggtcagatattgtacagtgatcaagagcgacaaactattctgcagcagattattgatttaaaaatgcttcaacaaaatgaggacattgattatcttgcaaagatcaataggctacaagaaaaagatttatctccttcagtatatcacactcttaagaaattggacgacaaattcaatgagcaagcacaaaagtcccaggatcttgctactaatgttctggaaaaagactgtcccactgtggagctgaatcctgaaactttgccttctacgttttctcaatttgacaatttatattcttcttcaattatcgatcttcccttgcatggagagttgttctggacatgccgaagtccacttcaaagtaatcagttgtggtcccaaaatattcaagaccttgggatatgcaaagaacttgtttgtcaagacgattttaacatccctgatgttgacttaactttccaaaactttgaggaactatttggaggagatcaagattcaattagaatactgcttgatgatcaagatgtctcctgctcttctttagagaaggataagtcagttggcaagtcagatattgacaatccaagtgcaatggaggaatcttctgcagctgcgtctattactatctcccaatctgatcttgacaataaggatatgaatcctctcagccagtaccgtccaagaagcatggatcccgcccttgcaattcgaccatttgattcaaccataccattctccgttttgagattcaatgaggaaagcagttgcactagccatgatgacagtgccctttctccctacagtgaaaggaaggcttattcaggtagttaa

SEQ ID NO: 528 - protein, 438 aa, Glycine max
  GmBBX51 soybean B-box polypeptide
MEKVCEFCTALRPLVYCKADAAYLCLSCDSKVHLANAVSGRHLRNFVCHSCGYHLAYVLCLEHKMLICRDCDQKLHNISLPHKKRAIRSFMGCPSAKDFAALWGFESNEIENSATQDQFGSVSCVSADLNVAQVSGKPGIQTGIPSMPSGAKFDGGGSTSQQGQILYSDQERQTILQQIIDLKMLQQNEDIDYLAKINRLQEKDLSPSVYHTLKKLDDKFNEQAQKSQDLATNVLEKDCPTVELNPETLPSTFSQFDNLYSSSIIDLPLHGELFWTCRSPLQSNQLWSQNIQDLGICKELVCQDDFNIPDVDLTFQNFEELFGGDQDSIRILLDDQDVSCSSLEKDKSVGKSDIDNPSAMEESSAAASITISQSDLDNKDMNPLSQYRPRSMDPALAIRPFDSTIPFSVLRFNEESSCTSHDDSALSPYSERKAYSGS

SEQ ID NO: 529 - DNA, 726 bp, Glycine max
  GmBBX52
atgaagggtaagacttgcgagctttgtgatcaacaagcttctctctattgtccctccgattccgcatttctctgctccgactgcgacgccgccgtgcacgccgccaactttctcgtagctcgtcacctccgccgcctcctctgctccaaatgcaaccgtttcgccggatttcacatctcctccggcgctatatcccgccacctctcgtccacctgcagctcttgctccccggagaatccttccgctgactactccgattctctcccttcctcttctacctgcgtctccagttccgagtcttgctccacgaagcagattaaggtggagaagaagaggagttggtcgggttcctccgtgaccgacgacgcatctccggcggcgaagaagcggcagaggagtggaggatcggaggaggtgtttgagaaatggagcagagagatagggttagggttagggttaggggtaaacggaaatcgcgtggcgtcgaacgctctgagtgtgtgcctgggaaagtggaggtggcttccgttcagggtggctgctgcgacgtcgttttggttggggctgagattttgtggggacagagggctggcctcgtgtcagaatctggcgaggttggaggcaatatccggagtgccagttaagctgattctggccgcacatggcgacctggcacgtgtcttcacgcaccgccgcgaattgcaggaaggatggggcgagtcctag

SEQ ID NO: 530 - protein, 241 aa, Glycine max
  GmBBX52 soybean B-box polypeptide
MKGKTCELCDQQASLYCPSDSAFLCSDCDAAVHAANFLVARHLRRLLCSKCNRFAGFHISSGAISRHLSSTCSSCSPENPSADYSDSLPSSSTCVSSSESCSTKQIKVEKKRSWSGSSVTDDASPAAKKRQRSGGSEEVFEKWSREIGLGLGLGVNGNRVASNALSVCLGKWRWLPFRVAAATSFWLGLRFCGDRGLASCQNLARLEAISGVPVKLILAAHGDLARVFTHRRELQEGWGES

SEQ ID NO: 531 - DNA, 732 bp, Glycine max; identical to SEQ ID NO: 431
  GmBBX53

SEQ ID NO: 532 - protein, 243 aa, Glycine max; identical to SEQ ID NO: 432
  GmBBX53 soybean B-box polypeptide

SEQ ID NO: 533 - DNA, 375 bp, Glycine max
  GmBBX54
atgtgcaaaggtgcagaaggagaaaagcaacatggtttctgcagcagctttctacataaagagagtgcaaccagaagtgctatatgttgtgagctatgtgggttacaggcttcattgtattgccaagctgatgatgcctacttgtgtaaaaaatgcgataaacgggttcatgaagctaattttttggcccttaggcacattaggtgctttctgtgcaacacatgtcagaaccttacgcgaagatatctcattggagcatcactagaggtggttcttccggccaatataaactggaccattagaaatctccttaacaacagaggaatctacagaaagtgttcaagaatgcataacagcccttccctctttttataa

SEQ ID NO: 534 - protein, 93 aa, Glycine max
  GmBBX54 soybean B-box polypeptide
MCKGAEGEKQHGFCSSFLHKESATRSAICCELCGLQASLYCQADDAYLCKKCDKRVHEANFLALRHIRCFLCNTCQNLTRRYLIGASLEVVLP

SEQ ID NO: 535 - DNA, 375 bp, Glycine max
  GmBBX55
atgtgcaaaggtgcagaaggagaaaagcaacatggtttctgcagcagctatctacataaagaatgtgcaaccagaagtgctacatgttgtgagctatgtgggttacaggcttcattgtattgtcaagctgatgatgcatacttgtgtagaaaatgtgataaaagggttcatgaagctaattttttggcccttaggcacattaggtgctttctgtgcaacacatgtcaaaaccttacgcgaagatatctcattggagcatcaatagaggtggttcttccagccaacattaactggaccattggaaatctccctagcaacagaggaatccacagaaagtgctcaagaatgcataacaacctttccctcttgttataa

SEQ ID NO: 536 - protein, 92 aa, Glycine max
  GmBBX55 soybean B-box polypeptide
MCKGAEGEKQHGFCSSYLHKECATRSATCCELCGLQASLYCQADDAYLCRKCDKRVHEANFLALRHIRCFLCNTCQNLTRRYLIGASIEVVL

SEQ ID NO: 537 - DNA, 651 bp, Glycine max
  GmBBX56
atggaggaatcatcaacaacatgcgtgttgtgcgagaagagggcaatgatgctctgcgactcggaccaggctaagctatgctgggaatgcgacgagaaagtccacagcgccaatttcttggtcgcgaaacattctagggttcttttatgtcgtttgtgtcactccccgactccgtggaaggcttcggggatgaaactcacgcccactgtgtcgttttgtaaccgctgcgttgcggaacggaacgcgaggtggaaccgattggtgaataatgaaaatgaacatcaacaacagcaacaacaacaacaacagagtgattttgtggtggatgatggtagggaatatggttctgatcatgtttttgatgatgacgatggtgattatagtgatgatagtggtgaagaagaagaagaggacgaggatgatgaagaggagaatgagaatcaagtggttccaatgtcttctggttctgccacgtcaccacctaaggttgcctgtttagcgttgaagcgattgagaaacaactctttttctgtcgattcttcacatgatgagacagcgtgctcttcatctgagatgcttagttctacattgcctagtggtgatgaatcaacctctttgagtagtgtattaaagaggcatcgggttgattag

SEQ ID NO: 538 - protein, 216 aa, Glycine max; identical to SEQ ID NO: 22
  GmBBX56 soybean B-box polypeptide

SEQ ID NO: 539 - DNA, 465 bp, Glycine max
  GmBBX57
atgaggaagtgtgagctctgtaacagtcccgcgaagttgttctgcgaatcagatcaagccagcctctgttggaaatgcgatgctaaggttcacagtgcaaacttcctcgtcaccaaacatcccaggattcttctctgccatgtttgtcaatcactaacagcgtggcacggcacaggacccaagtttgtacccaccatgtcagtttgcaacacttgtgtcaacaacaatagtactgagacctgcagccaacagaatcatgaagacgatgatgatgatggtacgggagaggatcatgcagaaaacgacgatggtggtgtggctgaagatgatgatgatgatgatgatgaagaaaatcaagtggttccatggacatctacaccaccacccccagcttccacttcttcaaatagtgttacaactagttctaccaggttctctgatgttgaagaaggtggctccgattaa

SEQ ID NO: 540 - protein, 88 aa, Glycine max
  GmBBX57 soybean B-box polypeptide
MRKCELCNSPAKLFCESDQASLCWKCDAKVHSANFLVTKHPRILLCHVCQSLTAWHGTGPKFVPTMSVCNTCVNNNSTETCSQQNHED

SEQ ID NO: 541 - DNA, 459 bp, Glycine max
  GmBBX58
atgaggaagtgtgaactctgtaatagtcccgcaaagttgttctgtgaatcagatcaagccagcctctgttgggaatgcgatgctaaggttcacagtgcaaacttcctcgtcaccaaacatcccaggattcttctctgccatgtttgtcaatcactaacggcctggcacggcacgggacccaagtttgtacccaccatgtccgtttgcaacacttgtgtcaacaacaatagtgagacctgcagccaacagaatcatgttgaggaccacgacgacaatcatgatgatggcacgggagaggatcatgtagaaaaccatgatggtggtgtgtctgaagatgatgaagaaaatcaagttgttccatggacatctacaccaccacccccagcttccacttcttcaaatagtgttacaactagttctaccaggttctctaatgttgaagaaggtggctccgattaa

SEQ ID NO: 542 - protein, 152 aa, Glycine max; identical to SEQ ID NO: 38
  GmBBX58 soybean B-box polypeptide

SEQ ID NO: 543 - DNA, 534 bp, Glycine max
  GmBBX59
atgaacaagtgcgaactgtgcaaagttccggcgaggatcttctgcgagtcggaccaggcgagcttatgctgggactgcgacgctaaggttcacagcgccaacttcttggtcgcgagacacgcgcgaaccttactctgccgcacgtgccgctctcccacgccgtggaaggcctccggcgcctcactcgccagcgccgtctccgtctgcgaccgctgcgccgcctccgaagaaccggaagagagtgaagccggcaatgacgacgaaccagacacggaggacgacgacaacgacgacgaggacggcgacaatcaggtcgtgccgtggtcctcctccccgccgccgcctccgccgtcgagctcctccggcagcgaatggtcggagtgcaaaaacgacgacgcttctatttccgcctcggaacaggaaacgacaacatgctcgttgaaacgacagcgcgaggacgatgatgatgcttcttccgatcgtgatcccagggtgttgagaagggttgggcgtctcaacggaggttgcgtgtga

SEQ ID NO: 544 - protein, 177 aa, Glycine max; identical to SEQ ID NO: 24
  GmBBX59 soybean B-box polypeptide

SEQ ID NO: 545 - DNA, 522 bp, Glycine max
  GmBBX60
atgaagaagtgcgaactgtgtaaagttccggcgaggatcttctgcgagtcggaccaggctagcttatgctgggactgcgacgctaaggttcacagcgccaacttcttggtcgcgaggcacgtgcgaaccctactctgccgcacgtgtcgttctcccacgccctggaaggcctccggcgcctcactcgcccacgccgcctccgtctgcgaccgctgcgccgccgcggaagagacggaagagagcgaagccggcaatgacgacgaaccagacaccgaggacgacgacgatgtcgacaaccaggtcgtgccgtggtcctccacgccgccgccgccgccgccgtcgagctcctccggcagcgaatgctcggagtgcaaaaacaacgttgcttctttttccgcctcggaacaggaaacgacaacatcctcgttgaaacgacagcgcgaggacgacgacgatgcttcttccgatcctgatcccagggtgttgagaagggttgggcgtctcaacggaggttgcgtgtga

SEQ ID NO: 546 - protein, 89 aa, Glycine max
  GmBBX60 soybean B-box polypeptide
MKKCELCKVPARIFCESDQASLCWDCDAKVHSANFLVARHVRTLLCRTCRSPTPWKASGASLAHAASVCDRCAAAEETEESEAGNDDEP

SEQ ID NO: 547 - DNA, 666 bp, Glycine max
  GmBBX61
atgaagaactgcgagctatgcaagcttccagctaggaccttctgcgagtcggaccaggctagcttatgctgggactgcgacgccaaggtccacggagcgaacttcctcgtcgcgagacacacgcgcacgctcctctgccacgcgtgccagtcactcacgccgtggaaggcctccggctctgccctcggcaacaccgtctcgctgtgccagagttgcgccggcggaaccaccgaacagggcccagagagccaaggagggaatgacgacgacgacatagacaccgacgatgaggatgactacgatgacgatggtgagagcgaggagaacgaggttgcagccgacgaggaggacggagacaaccaggttgtcccttggtcctccgagccgccgccaccgtccccaagctcttccagcagcgaagagtcgattagccggtgcaacaacgtggacgaggtttcgaccacattgaaacgacgtcgcgagaacgacgattttcagggttcgaattcgaataattggaaatgtgaacggagcgaagtggacagaggatgttggttggctcggttgcggcggagaaccgccgatgatgtggcggttgagcgacggagggctagagcggcgtttccgtacggttgttgtgatgatagagcatctgaagacgtttga

SEQ ID NO: 548 - protein, 221 aa, Glycine max; identical to SEQ ID NO: 32
  GmBBX61 soybean B-box polypeptide

SEQ ID NO: 549 - DNA, 666 bp, Glycine max
  GmBBX62
atgaagaactgcgagttgtgcaagcttccggctcggactttctgcgagtcggaccaggctagcttatgctgggactgcgacgccaaggttcatggagccaacttcctcgtggaaagacacacgcgcacgctcctctgccacgcgtgccagtcgcccacgccgtggaaggcctccggcgccgccctcggaaacaccgtctcgctgtgcgagagatgcgccggcggaaccaccgaacaaggtcaagagagccaaggaggcaatgacgacgacatagacaccgacatagacaccgacgatgaggatgactacgatgagagcgaggacgaggttgccgccgacgaggaggacggagacaaccaggttgtcccttggtcctccgagccgccgccaccagccccgagctcttccagcagcgaagaatcggttagccggtgcaacaacgtggacgaggtttcgaccacattgaaacgccgtcgccaggaggacaatgattttcagggttggaattcgaataattggggatgtgaacggagcgaagtggagagaggaggttggttggttcggttgcggcggagaaccgccgatgatgtggcggttgagcaacggagtgctagagcggcgtctccagacggttgctgtggtgatagagcatctgaagacgtttga

SEQ ID NO: 550 - protein, 88 aa, Glycine max
  GmBBX62 soybean B-box polypeptide
MKNCELCKLPARTFCESDQASLCWDCDAKVHGANFLVERHTRTLLCHACQSPTPWKASGAALGNTVSLCERCAGGTTEQGQESQGGND
